(19) United States
(12) Patent Application Publication
(10) Pub. No.: US 2024/0384006 A1
(43) Pub. Date: Nov. 21, 2024

(54) CD20 AND CD22 TARGETING ANTIGEN-BINDING MOLECULES FOR USE IN PROLIFERATIVE DISEASES

(71) Applicant: AMGEN RESEARCH (MUNICH) GMBH, Munich (DE)

(72) Inventors: Marc Panzer, Munich (DE); Jonas Honer, Munich (DE); Wibke Deisting, Munich (DE); Tobias Raum, Munich (DE); Lars Gaedtke, Munich (DE); Doris Rau, Munich (DE); Lisa Winkel, Munich (DE)

(21) Appl. No.: 18/286,941

(22) PCT Filed: May 6, 2022
(86) PCT No.: PCT/EP2022/062311

§ 371 Date: Oct. 13, 2023

Related U.S. Application Data
(60) Provisional application No. 63/201,634, filed on May 6, 2021.

(51) Int. Cl. C07K 16/46; C07K 16/28

(52) U.S. Cl. CPC C07K 16/468; C07K 16/2803; C07K 16/2809; C07K 16/2887; C07K 2317/31; C07K 2317/524; C07K 2317/526; C07K 2317/53; C07K 2317/565; C07K 2317/622; C07K 2317/92; C07K 2317/94

(57) ABSTRACT

The present invention provides CD20 and CD22 targeting antigen-binding molecules characterized by comprising a first and a second domain, binding to CD20 and CD22, respectively, a third domain binding to an extracellular epitope of the human and the Macaca CD3ε chain and optionally a fourth domain, which is a Fc modality. Moreover, the invention provides a polynucleotide, encoding the antigen-binding molecule, a vector comprising this polynucleotide, host cells, expressing the antigen-binding molecule and a pharmaceutical composition comprising the same.

### TECHNICAL FIELD

[0001] This invention relates to products and methods of biotechnology, in particular to CD20 and CD22 targeting antigen-binding molecules, their preparation and their use.

### BACKGROUND

[0002] Bispecific molecules useful in immunooncology can be antigen-binding polypeptides such as antibodies, e.g. IgG-like, i.e. full-length bispecific antibodies, or non-IgG-like bispecific antibodies, which are not full-length antigen-binding molecules. Full length bispecific antibodies typically retain the traditional monoclonal antibody (mAb) structure of two Fab arms and one Fc region, except the two Fab sites bind different antigens. Non-full-length bispecific antibodies can lack an Fc region entirely. These include chemically linked Fabs, consisting of only the Fab regions, and various types of bivalent and trivalent single-chain variable fragments (scFvs). There are also fusion proteins mimicking the variable domains of two antibodies. An example of such a format is the bi-specific T-cell engager (BiTE®) (Yang, Fa; Wen, Weihong; Qin, Weijun (2016). “Bispecific Antibodies as a Development Platform for New Concepts and Treatment Strategies”. International Journal of Molecular Sciences. 18 (1): 48).

[0003] Exemplary bispecific antibody-derived molecules such as BiTE® molecules are recombinant protein constructs made from two flexibly linked antibody derived binding domains. One binding domain of BiTE® molecules is specific for a selected tumor-associated surface antigen on target cells; the second binding domain is specific for CD3, a subunit of the T cell receptor complex on T cells. By their particular design, BiTE® antigen-binding molecules are uniquely suited to transiently connect T cells with target cells and, at the same time, potently activate the inherent cytolytic potential of T cells against target cells. An important further development of the first generation of BiTE® molecules (see WO 99/54440 and WO 2005/040220) developed into the clinic as AMG 103 and AMG 110 was the provision of bispecific antigen-binding molecules binding to a context independent epitope at the N-terminus of the CD3ε chain (WO 2008/119567). BiTE® molecules binding to this elected epitope do not only show cross-species specificity for the human and the Macaca, or Callithrix jacchus, Saguinus oedipus or Saimiri sciureus CD3ε chain, but also, due to recognizing this specific epitope (instead of previously described epitopes of CD3 binders in bispecific T cell engaging molecules), do not demonstrate unspecific activation of T cells to the same degree as observed for the previous generation of T cell engaging antibodies. This reduction in T cell activation was connected with less or reduced T cell redistribution in patients, the latter being identified as a risk for side effects, e.g. in pasotuximab.

[0004] Antibody-based molecules as described in WO 2008/119567 are characterized by rapid clearance from the body; thus, while they are able to reach most parts of the body rapidly, their in vivo applications may be limited by their brief persistence in vivo. On the other hand, their concentration in the body can be adapted and fine-tuned at short notice. Prolonged administration by continuous intravenous infusion is used to achieve therapeutic effects because of the short in vivo half-life of this small, single chain molecule. However, bispecific antigen-binding molecules are available which have more favorable pharmacokinetic properties, including a longer half-life as described in WO 2017/134140. An increased half-life is typically useful in in vivo applications of immunoglobulins, especially with respect to especially antibody fragments or constructs of small size, e.g. in the interest of patient compliance.

[0005] One challenging ongoing problem in antibody-based immunooncology is tumor escape. Such tumor escape happens when the immune system—even if triggered or directed by some antibody-based immune-therapeutics—is not capable enough to eradicate tumors, which carry accumulated genetic and epigenetic alterations and use several mechanisms to be the victorious of the immunoediting process (Keshavarz-Fathi, Mahsa; Rezaei, Nima (2019) “Vaccines for Cancer Immunotherapy”). Generally, four mechanisms interfering with effective antitumor immune responses are known: (1) defective tumor antigen processing or presentation, (2) lack of activating mechanisms, (3) inhibitory mechanisms and immunosuppressive state, and (4) resistant tumor cells. Especially with respect to the first mechanism, tumor antigens might be present in a new form due to the genetic instability, mutation of the tumor and escape from immune system. Epitope-negative tumor cells remain hidden and consequently resistant to the immune rejection. They have been developed following the elimination of epitope-positive tumor cells, similar to Darwin's theory of natural selection. In consequence, antibody-based immune-therapy directed against an antigen on tumor cells is rendered ineffective when such tumor cells no longer express a respective antigen due to tumor escape. Said antigen loss is understood herein as driving force for tumor escape and thus, used interchangeably. Accordingly, there is a need to provide improved antibody-based immunooncology which addresses the problem of antigen loss to effectively prevent tumor escape.

[0006] Further, despite the so-far achieved pre-clinical and clinical success of antibody-based immune-therapeutics, notable limitations remain including differential responses between individuals and cancer types. Not all patients will respond to therapy at available safe doses as dose-limiting toxicity can be a limiting factor for the efficacy of antibody-based immune-therapeutics. Hence, there is also a need to reduce dose-limiting toxicity in antibody-based immune-therapeutics to make such therapy available to more patients suffering from diverse proliferative diseases.

[0007] Another challenge to the broad utilization of immunooncology with respect to T-cell engaging bispecific molecules is the availability of suitable targets (Bacac et al., Clin Cancer Res; 22(13) Jul. 1, 2016). For example, solid tumor targets may be overexpressed on tumor cells but expressed at lower, yet significant levels on non-malignant primary cells in critical tissues. In nature, according to Bacac et al, T cells can distinguish between high- and low-antigen expressing cells by means of relatively low-affinity T cell receptors (TCRs) that can still achieve high-avidity binding to target cells expressing sufficiently high levels of target antigen. T-cell engaging bispecific molecules that could facilitate the same, and thus maximize the window between killing of high- and low-target expressing cells, are thus highly desirable. One approach discussed in the art is the use of dual targeting of two antigens on the same cell leads to improved target selectivity over normal tissues that express only one or low levels of both target antigens. This effect is thought to be dependent on the avidity component mediated by the concurrent binding of the bsAb to both antigens on the same cell. With respect to dual targeting as such, some multispecific monoclonal antibodies (mAb) or other immune constructs are known in the art. WO 2014/116846 teaches a multispecific binding protein comprising a first binding site that specifically binds to a target cell antigen, a second binding site that specifically binds to a cell surface receptor on an immune cell, and a third binding site that specifically binds to cell surface modulator on the immune cell. US 2017/0022274 discloses a trivalent T-cell redirecting complex comprising a bispecific antibody, wherein the bispecific antibody has two binding sites against a tumor-associated antigen (TAA) and one binding site against a T-cell. While different multispecific antibodies or antibody fragments are known in the art, some of which address T-cells, no CD20 and CD22 targeting bispecific molecules employing the mechanism of a—preferably single chain-bispecific T-cell engaging molecule has been proposed before which both addresses the need of overcoming antigen loss/tumor escape and to reduce dose-limiting toxicity in antibody-based immune-therapeutics while effectively redirecting T-cells by one stable and ready-to-use therapeutic system.

### SUMMARY

[0008] In view of the needs described above, it is an object of the present invention to provide CD20 and CD22 targeting antigen-binding molecules, typically polypeptides, such as T cell engaging bispecific molecules, which are specifically suitable to bind two antigens on a target cell associated with specific conditions and one antigen on an effector cell at the same time, preferably for use in the treatment of said specific conditions. The molecules should further show high producibility, stability and activity. Accordingly, the present invention provides a CD20 and CD22 targeting bispecific antigen-binding molecule characterized by comprising a first domain binding to CD20 as the first target cell surface antigen (TAA), a second domain binding to the CD22 (the second TAA), a third domain binding to an extracellular epitope of the human and non-human, e.g. Macaca CD3ε chain, and preferably a fourth domain, which is a specific Fc modality which modulates half-life of the molecule. Preferably, the domains are binding domains comprised of VH and VL domains in amino to carboxyl orientation, respectively, wherein a flexible but short peptide linker links the VL of the first binding domain to the VH of the second binding domain. Surprisingly, activity of the molecules of the present invention against target cells associated with particular diseases can be preserved thereby without steric hindrance between the first and the second binding domain, and without the requirement of providing long linkers which would disadvantageously be more prone to degradation, cleavage or the like than the instantly provided shorter linkers. At the same time, the molecules are well producible and show good product homogeneity. Moreover, the invention provides a polynucleotide encoding the antigen-binding molecule, a vector comprising this polynucleotide, and host cells expressing the construct and a pharmaceutical composition comprising the same.

[0009] In a first aspect, it is envisaged in the context of the present invention to provide a CD20 and CD22 targeting antigen-binding molecule comprising at least three binding domains, wherein
[0010] (i.) the first binding domain comprises a paratope which immuno-specifically binds to CD20, wherein the first binding domain comprises a VH region comprising CDR-H1, CDR-H2 and CDR-H3 and a VL region comprising CDR-L1, CDR-L2 and CDR-L3 selected from:
[0011] a) CDR H1-3 of SEQ ID NO: 58-60 and CDR L1-3 of SEQ ID NO: 61-63,
[0012] b) CDR H1-3 of SEQ ID NO: 71-73 and CDR L1-3 of SEQ ID NO: 74-76,
[0013] c) CDR H1-3 of SEQ ID NO: 84-86 and CDR L1-3 of SEQ ID NO: 87-89, and
[0014] d) CDR H1-3 of SEQ ID NO: 97⁻⁹⁹ and CDR L1-3 of SEQ ID NO: 100-102;
[0015] (ii.) the second binding domain comprises a paratope which immuno-specifically binds to CD22, wherein the first binding domain comprises a VH region comprising CDR-H1, CDR-H2 and CDR-H3 and a VL region comprising CDR-L1, CDR-L2 and CDR-L3 selected from
[0016] a) CDR H1-3 of SEQ ID NO: 138-140 and CDR L1-3 of SEQ ID NO: 141-143,
[0017] b) CDR H1-3 of SEQ ID NO: 151-153 and CDR L1-3 of SEQ ID NO: 154-156,
[0018] c) CDR H1-3 of SEQ ID NO: 164-166 and CDR L1-3 of SEQ ID NO: 167-169,
[0019] d) CDR H1-3 of SEQ ID NO: 177-179 and CDR L1-3 of SEQ ID NO: 180-182,
[0020] e) CDR H1-3 of SEQ ID NO: 190-192 and CDR L1-3 of SEQ ID NO: 193-195,
[0021] f) CDR H1-3 of SEQ ID NO: 203-205 and CDR L1-3 of SEQ ID NO: 206-208,
[0022] g) CDR H1-3 of SEQ ID NO: 125-127 and CDR L1-3 of SEQ ID NO: 128-130,
[0023] h) CDR H1-3 of SEQ ID NO: 216-218 and CDR L1-3 of SEQ ID NO: 219-221, and
[0024] i) CDR H1-3 of SEQ ID NO: 379-381 and CDR L1-3 of SEQ ID NO: 382-384;
[0025] and
[0026] (iii.) the third binding domain comprises a paratope which immune-specifically binds to an extracellular epitope of the human and/or the Macaca CD3ε chain,
   [0027] wherein the first, second and third binding domain are arranged in an amino to carboxyl order, and wherein the first binding domain and the second binding domain are linked by a peptide linker having a length of 5 to 24, preferably 18 amino acids.

[0028] Within said aspect, it is also envisaged in the context of the present invention to provide an multispecific antigen-binding molecule, wherein the antigen-binding molecule comprises a fourth domain which comprises two polypeptide monomers, each comprising a hinge, a CH2 and a CH3 domain, wherein said two polypeptide monomers are fused to each other via a peptide linker.

[0029] Within said aspect, it is also envisaged in the context of the present invention to provide an multispecific antigen-binding molecule, wherein said forth domain comprises in an amino to carboxyl order:
[0030] hinge-CH2-CH3-linker-hinge-CH2-CH3.

[0031] Within said aspect, it is also envisaged in the context of the present invention to provide an multispecific antigen-binding molecule, wherein each of said polypeptide monomers in the fourth domain has an amino acid sequence that is at least 90% identical to a sequence selected from the group from the group consisting of: SEQ ID NO: 17-24, wherein preferably each of said polypeptide monomers has an amino acid sequence selected from SEQ ID NO: 17-24.

[0032] Within said aspect, it is also envisaged in the context of the present invention to provide an multispecific antigen-binding molecule, wherein the CH2 domain comprises an intra domain cysteine disulfide bridge.

[0033] Within said aspect, it is also envisaged in the context of the present invention to provide an multispecific antigen-binding molecule, wherein the first, second, third and the optional fourth binding domain are arranged in an amino to carboxyl order.

[0034] Within said aspect, it is also envisaged in the context of the present invention to provide an multispecific antigen-binding molecule, wherein the antigen-binding molecule is a single chain antigen-binding molecule, preferably a multispecific scFv antigen-binding molecule.

[0035] Within said aspect, it is also envisaged in the context of the present invention to provide an multispecific antigen-binding molecule, wherein the first, second, and third binding domain each comprise in a amino to carboxyl order a VH domain and a VL domain.

[0036] Within said aspect, it is also envisaged in the context of the present invention to provide an multispecific antigen-binding molecule, wherein the peptide linker between the VL of the first binding domain and the VH of the second binding domain is selected from having a length of 5, 6, 7, 8, 9, 10, 11, 12, 13, 14, 15, 16, 17, 18, 19, 20, 21, 22, 23, or 24 amino acids, preferably 5, 6, 7, 8, 9, 10, 11 or 12 amino acids, more preferably 6 amino acids.

[0037] Within said aspect, it is also envisaged in the context of the present invention to provide an multispecific antigen-binding molecule, wherein the peptide linker between the VL of the first binding domain and the VH of the second binding domain is a flexible linker which comprises serine and glycine as amino acid building blocks, preferably only serine (Ser, S) and glycine (Gly, G).

[0038] Within said aspect, it is also envisaged in the context of the present invention to provide an multispecific antigen-binding molecule, wherein the peptide linker between the first binding domain and the second binding domain is preferably rich in small and/or hydrophilic amino acids and preferably selected from the group consisting of S(G₄S)n, (G₄S)n, (G₄)n, and (G₅)n, wherein n equals 1, 2, 3 or 4, more preferably n equals 1 or 2, more preferably SG₄S.

[0039] Within said aspect, it is also envisaged in the context of the present invention to provide a CD20 and CD22 targeting antigen-binding molecule, wherein
[0040] the first binding domain and the second binding domain each comprise a VH region comprising CDR-H1, CDR-H2 and CDR-H3 and a VL region comprising CDR-L1, CDR-L2 and CDR-L3 selected from:
   a) CDR H1-3 of SEQ ID NO: 58-60 and CDR L1-3 of SEQ ID NO: 61-63 of the first binding domain and CDR H1-3 of SEQ ID NO: 138-140 and CDR L1-3 of SEQ ID NO: 141-143 of the second binding domain;
   b) CDR H1-3 of SEQ ID NO: 58-60 and CDR L1-3 of SEQ ID NO: 61-63 of the first binding domain and CDR H1-3 of SEQ ID NO: 151-153 and CDR L1-3 of SEQ ID NO: 154-156 of the second binding domain;
   c) CDR H1-3 of SEQ ID NO: 58-60 and CDR L1-3 of SEQ ID NO: 61-63 of the first binding domain and CDR H1-3 of SEQ ID NO: 164-166 and CDR L1-3 of SEQ ID NO: 167-169 of the second binding domain;
   d) CDR H1-3 of SEQ ID NO: 58-60 and CDR L1-3 of SEQ ID NO: 61-63 of the first binding domain and CDR H1-3 of SEQ ID NO: 177-179 and CDR L1-3 of SEQ ID NO: 180-182 of the second binding domain,
   e) CDR H1-3 of SEQ ID NO: 58-60 and CDR L1-3 of SEQ ID NO: 61-63 of the first binding domain and CDR H1-3 of SEQ ID NO: 190-192 and CDR L1-3 of SEQ ID NO: 193-195 of the second binding domain;
   f) CDR H1-3 of SEQ ID NO: 58-60 and CDR L1-3 of SEQ ID NO: 61-63 of the first binding domain and CDR H1-3 of SEQ ID NO: 203-205 and CDR L1-3 of SEQ ID NO: 206-208 of the second binding domain;
   g) CDR H1-3 of SEQ ID NO: 58-60 and CDR L1-3 of SEQ ID NO: 61-63 of the first binding domain and CDR H1-3 of SEQ ID NO: 125-127 and CDR L1-3 of SEQ ID NO: 128-130 of the second binding domain,
   h) CDR H1-3 of SEQ ID NO: 58-60 and CDR L1-3 of SEQ ID NO: 61-63 of the first binding domain and CDR H1-3 of SEQ ID NO: 216-218 and CDR L1-3 of SEQ ID NO: 219-221 of the second binding domain;
   i) CDR H1-3 of SEQ ID NO: 71-73 and CDR L1-3 of SEQ ID NO: 74-76 of the first binding domain and CDR H1-3 of SEQ ID NO: 379-381 and CDR L1-3 of SEQ ID NO: 382-384 of the second binding domain,
   j) CDR H1-3 of SEQ ID NO: 71-73 and CDR L1-3 of SEQ ID NO: 74-76 of the first binding domain and CDR H1-3 of SEQ ID NO: 203-205 and CDR L1-3 of SEQ ID NO: 206-208 of the second binding domain;
   k) CDR H1-3 of SEQ ID NO: 84-86 and CDR L1-3 of SEQ ID NO: 87-89 of the first binding domain and CDR H1-3 of SEQ ID NO: 164-166 and CDR L1-3 of SEQ ID NO: 167-169 of the second binding domain,
   l) CDR H1-3 of SEQ ID NO: 97⁻⁹⁹ and CDR L1-3 of SEQ ID NO: 100-102 of the first binding domain and CDR H1-3 of SEQ ID NO: 177-179 and CDR L1-3 of SEQ ID NO: 180-182 of the second binding domain;
   m) CDR H1-3 of SEQ ID NO: 97⁻⁹⁹ and CDR L1-3 of SEQ ID NO: 100-102 of the first binding domain and CDR H1-3 of SEQ ID NO: 190-192 and CDR L1-3 of SEQ ID NO: 193-195 of the second binding domain,

[0041] Within said aspect, it is also envisaged in the context of the present invention to provide an multispecific antigen-binding molecule, wherein the first binding domains is capable of binding to the first target cell surface antigen CD20 and the second binding domain is capable of binding to the second target cell surface antigen CD22 simultaneously, preferably wherein the first target cell surface antigen and the second target cell surface antigen are on the same target cell.

[0042] Within said aspect, it is also envisaged in the context of the present invention to provide a CD20 and CD22 targeting antigen-binding molecule of claim 1, wherein the third binding domain comprise a VH region comprising CDR-H1, CDR-H2 and CDR-H3 and a VL region comprising CDR-L1, CDR-L2 and CDR-L3 selected from:
[0043] a) CDR H1-3 of SEQ ID NO: 392-394 and CDR L1-3 of SEQ ID NO: 395-397; and
[0044] b) CDR H1-3 of SEQ ID NO: 401-403 and CDR L1-3 of SEQ ID NO: 404-406.

[0045] Within said aspect, it is also envisaged in the context of the present invention to provide an multispecific antigen-binding molecule, wherein the first, second and third domain, which are fused by respective peptide linkers, are fused to the fourth domain via a peptide linker.

[0046] Within said aspect, it is also envisaged in the context of the present invention to provide an multispecific antigen-binding molecule, wherein the antigen-binding molecule comprises in an amino to carboxyl order:
[0047] (a) the first domain;
[0048] (b) a peptide linker preferably having an amino acid sequence selected from the group consisting of SEQ ID NOs: 1-4 and 9-12, preferably 11;
[0049] (c) the second domain,
[0050] (d) a peptide linker preferably having an amino acid sequence selected from the group consisting of SEQ ID NOs: 1-3; and
[0051] (e) the third domain.

[0052] Within said aspect, it is also envisaged in the context of the present invention to provide an multispecific antigen-binding molecule, wherein the antigen-binding molecule further comprises in an amino to carboxyl order:
[0053] (f) a peptide linker having an amino acid sequence selected from the group consisting of SEQ ID NOs: 1, 2, 3, 9, 10, 11 and 12.
[0054] (e) the first polypeptide monomer of the fourth domain;
[0055] (f) a peptide linker having an amino acid sequence selected from the group consisting of SEQ ID NOs: 5, 6, 7 and 8; and
[0056] (g) the second polypeptide monomer of the fourth domain.

[0057] Within said aspect, it is also envisaged in the context of the present invention to provide an antigen-binding molecule, wherein the first binding domain comprises a VH region and a VL region selected from SEQ ID Nos: 64 as VH and 65 as L, 77 as VH and 78 as VL, 90 as VH and 91 as VL, 103 as VH and 104 as VL, respectively, and wherein the second binding domain comprises a VH region and a VL region selected from SEQ ID Nos: 144 as VH and 145 as VL, 157 and 158, 172 and 173, 183 and 184, 196 and 197, 209 and 210, 131 and 132, and 385 and 386, respectively.

[0058] Within said aspect, it is also envisaged in the context of the present invention to provide an antigen-binding molecule, wherein the first binding domain comprises a scFv sequence selected from the group consisting of SEQ ID Nos: 66, 79, 92, and 105, and wherein the second binding domain comprises a scFv sequence selected from the group consisting of SEQ ID Nos 146, 159, 172, 185, 198, 211, 133, 224 and 387, respectively.

[0059] Within said aspect, it is also envisaged in the context of the present invention to provide an multispecific antigen-binding molecule, wherein the antigen-binding molecule comprises a first (CD20) and second (CD22) target binding domain together with a third effector (CD3) binding domain and a fourth domain conferring extended half-life, the three binding domains and the forth domain linked together having a sequence selected from the group consisting of SEQ ID Nos: 238, 248, 258, 268, 278, 288, 308, 318, 328, 338, 348, 368 and 378.

[0060] In a second aspect, it is further envisaged in the context of the present invention to provide a polynucleotide encoding an antigen-binding molecule of the present invention.

[0061] In a third aspect, it is also envisaged in the context of the present invention to provide a vector comprising a polynucleotide of the present invention.

[0062] In a fourth aspect, it is further envisaged in the context of the present invention to provide a host cell transformed or transfected with the polynucleotide or with the vector of the present invention.

[0063] In a fifth aspect, it is also envisaged in the context of the present invention to provide a process for the production of an antigen-binding molecule of the present invention, said process comprising culturing a host cell of the present invention under conditions allowing the expression of the antigen-binding molecule and recovering the produced antigen-binding molecule from the culture.

[0064] In a sixth aspect, it is further envisaged in the context of the present invention to provide a pharmaceutical composition comprising an antigen-binding molecule of the present invention or produced according to the process of the present invention.

[0065] Within said aspect, is also envisaged in the context of the present invention that the pharmaceutical composition is stable for at least four weeks at about −20° C.

[0066] It is further envisaged in the context of the present invention to provide the antigen-binding molecule of the present invention, or produced according to the process of the present invention, for use in the prevention, treatment or amelioration of a disease selected from a proliferative disease, a tumorous disease, cancer or an immunological disorder.

[0067] Within said aspect, it is also envisaged in the context of the present invention that the CD20xCD22 targeting antigen-binding molecule is for use in the treatment of Non-Hodgkin lymphoma.

### DESCRIPTION OF THE FIGURES

[0068] FIG. 1: 48-hour FACS-based cytotoxicity assay of CD20- and CD22 dual targeting antigen-binding molecules with human CD20 and CD22 double positive human cell line Oci-Ly 1 (A), human CD20 single positive human cell line Oci-Ly 1 (CD22 knock out clone #A1) (B), and CD22 single positive human cell line Oci-Ly 1 (CD20 knock out clone #A5) (C) as target cells and panT as effector cells (E:T ratio 10:1). EC50 values are determined by the four parametric logistic regression models for evaluation of sigmoid dose response curves with fixed hill slope. Detailed Description

[0069] In the context of the present invention, a CD20 and CD22 targeting antigen-binding molecule is provided comprising at least three binding domains, wherein the first and second binding domain in amino to carboxyl orientation are capable to preferably target CD20 and CD22 simultaneously, wherein the third binding domain binds to an extracellular epitope of the human and/or the Macaca CD3ε chain on an effector cell which is a T cell.

[0070] It is a surprising finding in the context of the present invention that the T-cell engagingCD20 and CD22 targeting antigen-binding molecules according to the present invention with selected combinations of CD20 and CD22 target binders show superior yield, stability and a balanced activity between the two target binders. This improves both the practical aspects of producibility and storage capabilities as well as preferably reliable drug action. In this regard, it is found that molecules according to the present invention show HIC elution slopes as demonstrated herein which are typically higher than 15, preferably higher than 20 or even 25. Molecules according the generic setup according to the present invention which, however, do not comprise the specific binder selection as described herein, do typically show lower values indicating less product homogeneity. Even more pronounced is the yield as an indication for the overall productivity which is typically above 10 mg/L, preferably above 15 or even 20 mg/L of monomer, i.e. desired product. In contrast, other molecules of the generic format underlying the molecules described herein typically do not reach a yield above 10 mg/L. As a further indicator of product quality, the monomer peak symmetry in size exclusion chromatography (SEC) is typically improved for molecules comprising the specific binder selection according to the present invention. Such peak symmetry is preferably below a value of 1.4, more preferably below a value of 1.35 or lower. As the skilled person is aware of, a value close to 1 is typically preferred. However, other molecules according to the generic format underlying the molecules of the present invention typically to not reach values below 1.4. Further, molecules of the present invention typically show good activity with respect to cells which express both targets CD20 and CD22. Therefore, observed EC50 values are typically surprisingly low for molecules comprising the specific selection of anti-CD20 and anti-CD22 binders as claimed herein. Accordingly, the molecules of the present invention typically show EC50 values on CD20-CD22 double positive target cells, such as Oci-Ly 1 cells, of below 20 pM, preferably below 15 pM oder even more preferred below 10 pM. Other molecules according to the generic format underlying the molecules of the present invention typically show EC50 values of aboie 20 pM under corresponding conditions. Hence, higher efficacy can be attributed to the molecules according to the present invention.

[0071] In addition, molecules of the present invention fulfil the surprising features of molecules of the underlying generic format which are preferably suited to target two (different) antigens on one target cells, such as cancer cells, and in contrast, do less target non-cancer cells. By being capable to address two target antigens at the same time, (a) the likeliness of targeting a target cell such as a cancer cell is greatly increased once such target cell has undergone antigen loss and, thus, is prone to tumor escape from effective anti-tumor therapy because one valid antigen to target remains on the cell which has undergone antigen escape, and (b) the likeliness of targeting a target cell associated with a disease instead of a physiologic cell is greatly increased when two TAAs are chosen which are typically associated with a target cell associated with a disease instead of a physiologic cell. In this regard, CD20 and CD22 targeting antigen-binding molecules are envisaged herein, which do not only prevent antigen escape e.g. in a tumor setting, but so furthermore widen the therapeutic window by addressing cells with a pattern of, e.g., two antigens which re typically associated with a particular disease. Thereby, physiologic tissue whose cells express only one of the two targets is not addressed by the instant dual targeting antigen-binding molecules. In particular, a selectivity gap can be achieved by dual targeting molecules, e.g. of formats as described herein, which have a bispecific entity comprising a target binding domain (or binder, as synonymously used through-out this disclosure) and a CD3 binder, a further target binder and optionally a half-life extending domain such as a scFc domain. Dual targeting antigen-binding molecules as described herein typically feature EC50 values below 100 pM, preferably below 50 pM, more preferably below 30 pM and even more preferably about 10 pM or below on cells positive for both targets while such dual targeting molecules typically show significantly higher EC50 values (e.g. at least 50 pM, 100 pM, 250 pM or even 500 pM and higher) when employed with mono-targeting cells. This finding suggests that CD20 and CD22 targeting molecules of the present invention do have selectivity gaps in terms of activity of at least factor 10, preferably at least factor 20 or even 30, which can beneficially be used to specifically address pathogenic target cells which express both targets and which can be bound at the same time by said molecules in order to trigger T-cell mediated cytotoxicity. Off-target toxicities and related side effects can thereby be reduced and a safer therapy can be provided based on the instantly described concept. Hence, a T-cell engaging CD20 and CD22 targeting antigen-binding molecules according to the present invention, which is typically singe-chained, both provides improved efficacy and safety with regard to existing bispecific antibodies or antigen-binding molecules which are T-cell engaging. Said advantageous properties are preferably achieved by the fact that the first and the second binding domain of the CD20 and CD22 targeting antigen-binding molecule are capable to independently from each other to maintain their bioactivity, i.e. to bind their respective targets without being sterically hindered by the respective other binding domain and/or the target to which the respective other target binder has bound. The preserved bioactivity is preferably achieved by (a) the VH-VL setup in amino to carboxyl orientation of both binding domains and/or (b) the careful selection of the linker which links the first and the second binding domain. Said linker needs to have a length with ensures both bioactivity of both binding domains and sufficient (chemical) stability of the construct. Surprisingly relatively short peptide linkers of about 5 to 24, preferably 5 to 18, more preferably 6 or 12 amino acids in length fulfil both requirements. Preferably, such linkers are rich in small or hydrophilic amino acids, such as Gly and Ser, because such composition preferably provides flexibility. In consequence, such flexibility preferably allows for interaction of the respective binding domain independently of the other binding domain of the CD20 and CD22 targeting antigen-binding molecule according to the present invention. At the same time, it is surprising that even such short preferably flexible peptide linkers typically provide for sufficient spatial separation between the first and the second binding domain so that both domains retain their bioactivity which is required to have a therapeutically useful molecule in the context of the present invention. An additional advantage of such short linkers as disclosed in the context of the present invention is that interchain mispairings re preferably prevented in comparison to longer linkers.

[0072] The above-specified finding underlying the present invention is surprising in view of the teaching of the prior art. For example, Liu et al. showed that the longer the inter-peptide linkers were, the better the preservation of the independent folding and biological activities of the two molecules (Liu Z G, Lin J B, Du W, et al. Anti-proteolysis study of recombinant IIn-UK fusion protein in CHO cell. Prog Biochem Biophys 2005; 32:544-50). Linkers between binding domains, preferably scFv binding domains, that are too short negatively affect protein folding by spatial occupancy, and those that are too long enhance the antigenicity of the scFv antibody and also affect the functionality and activity of scFv antibodies. Xu et al. teach that sufficient length and certain sequence characteristics are the key factors that provide the two half-molecules with sufficient free space to fulfill their functions, and avoiding the formation of the a-helix and b-sheet is important for stability (Xue F, Gu Z, Feng J A. LINKER: a web server to generate peptide sequences with extended conformation. Nucleic Acids Res 2004; 32: W562-5). Hence, the skilled person aiming to maintain distance between binding domains would have contemplated to employ rigid linkers which typically feature a helical structure or are rich in proline. However, also the length of the rigid linkers has a major impact on protein bioactivity. McCormick et al examined rigid peptide linkers (Ala-Pro)n (10-34 aa) which were applied in an interferon-γ-gp120 fusion protein (McCormick A, Thomas M, Heath A. Immunization with an interferon-gamma-gp120 fusion protein induces enhanced immune responses to human immunodeficiency virus gp120. J Infect Dis. 2001; 184:1423-1430). With a short 10-aa linker, the fusion protein possessed a relatively low biological activity of interferon-γ. By increasing the linker length, the bioactivity of the fusion protein was gradually improved, peaking at 88% activity of free interferon-γ with the longest 34-residue linker. Even more, in some cases even with the insertion of flexible or rigid linkers, the impaired bioactivity can still not be overcome due to steric hindrance between domains (Bai Y, Ann D K, Shen W C. Recombinant granulocyte colony-stimulating factor-transferrin fusion protein as an oral myelopoietic agent. Proc Natl Acad Sci USA. 2005; 102:7292-7296).

[0073] In view of the obstacles know in the art, the skilled person would have been prompted to avoid short flexible or even rigid linkers and would turn to longer rigid lingers, wherein “long” could be understood from the art as about 30 amino acids, preferably comprising proline. Based on this information, the skilled person would preferably model the first and the second binding domain linked by a peptide linker to confirm what linker length to take and which to avoid using state of the art modeling technology. Provided the linker is a flexible linker rich in Ger and Ser, a linker length of 30 amino acids would typically lead to a rather large space between the first and the second binding domain, typically of at least 70 Å, more typically of at least 80 Å, which the skilled person would consider safe in size to accommodate the second target cell surface antigen (TAA2 CD22) to facilitate binding by the second binding domain of the CD20 and CD22 targeting antigen-binding molecule. It is important to note in the context of the present invention that while the first binding domain, i.e. the N-terminal binding domain, is comparably easy to access as it has only one adjacent binding domain which potentially causes steric hindrance when binding to the target, the second binding domain is connected to the first binding domain in N-direction

[0074] Typically, when a SGGGGS linker is modeled between the two target binding domains which are scFvs (, when a (GGGGS)3 linker between the VH and VL within the binding domains, respectively, when the first binding domain, e.g. an anti-MSLN binding domain, is fixed, and when three likely expected conformations are applied where the linker swings in different orthogonal (linker conformation 1, 2 and 3, respectively), then in case of linker position 3, a complete clash is observed, while in positions 1 and 2, no clash is observed. However, the space is typically still not enough to accommodate the TAA2 based on where the CDRs are preferably located in the second binding domain of the CD20 and CD22 targeting antigen-binding molecule according to the present invention. Hence, this result strongly indicates the need of a longer linker between the two target binding domains. If the skilled person used the size of target EpCAM as guide, one would predict a better linker to be one that has preferably at least about 30 residues, less preferred at least 20 residues (i.e. 70 A preferred distance divided by 3.8 per aa). Accordingly, lack of space renders a short linker solution such as a SGGGS linker and short multiplicities thereof (e.g. S(G4S)2 and S(G4S)2 between the two target binding domains according to the present invention a non-preferred and therefore non-obvious choice for this setup of target binders in a CD20 and CD22 targeting antigen-binding molecule, in particular a dual targeting BiTE® molecule. The same applies to a linker of 12 aa which typically offers a maximum available space as small as about 35 Å which, depending on the circumstances, can be up to about 50 Å which would not safely accommodate typical target to be bound which is at least about 45, 50, 55, 60, 65, 70, 75, 80 or 85 Å in size. Also, an 18 aa long linker (e.g. SGGGGSGGGGSGGGGSGG) with a maximum available space between binding domains in a setup as described herein of not more than 60 Å, typically not more than 55 Å, for example, 54 to 60 Å, would likely not allow binding to the second TAA2 of an exemplary size of 45 to 70 Å. In contrast, a 30 aa long linker would typically offer 84 to 94 Å of maximum space, thus safely allowing the target binder to bind its exemplified target of about 45 to 70 Å. Thus, the skilled person would have chosen a linker length at least greater than 18 aa to ensure binding of the second TAA2, such as in a HLE dual BiTE® as an example for the CD20 and CD22 targeting antigen-binding molecule according to the present invention. It has to be noted that the above considerations are based on flexible linkers with a high Ser and/or Gly content. The skilled person would have contemplated that less flexible likers may require even higher numbers of amino acids to ensure sufficient length to keep distance between the two adjacent target binding domains according to the present invention, in order to keep said target binding domains biologically functional.

[0075] It is especially envisaged in the context of the present invention that a CD20 and CD22 targeting antigen-binding molecule which addresses two different target cell surface antigens thereby is very specific for its target cell and, therefore, preferably safe in its therapeutic use. This has been demonstrated in a cynomolgus toxicology study.

[0076] B-lymphocyte antigen CD20 or CD20 is expressed on the surface of all B-cells beginning at the pro-B phase (CD45R+, CD117+) and progressively increasing in concentration until maturity. CD22, or cluster of differentiation-22, is a molecule belonging to the SIGLEC family of lectins. It is found on the surface of mature B cells and to a lesser extent on some immature B cells.

[0077] Further, it is envisaged as optionally but advantageously in the context of the present invention that the CD20 and CD22 targeting antigen-binding molecule is provides with a fourth domain, typically a scFc domain, i.e. a HLE, antigen-binding molecule enables intravenous dosing that is administrated only once every week, once every two weeks, once every three weeks or even once every four weeks, or less frequently.

[0078] In order to determine the epitope(s) of preferred CD20 and CD22 targeting antigen-binding molecules according to the present invention directed, e.g. to the CD20 epitope, mapping was conducted as described herein. The human CD20 protein extracellular region was divided into two parts: (1) extracellular loop 1 (ECL1, amino acids 72 to 84, see references in Example 17), designated E1, and extracellular loop 2 (ECL2), designated E2. The extracellular loop 1 (E1) was further divided into two subparts, designated E1A (aa 72 to 79) and E1B (aa 80 to 84). The extracellular loop 2 (E2, aa 142 to 188) was further divided into four subparts, designated E2A (aa 142 to 161), E2B (aa 162 to 166), E2C (aa 167 to 175) and E2D (aa 176 to 188). It was surprisingly found that CD20 antigen-binding molecules, both mono and dual targeting, show preferably higher cytotoxic activity when binding (i.) to the E1A and the E2B and E2C epitope or (ii.) to the E2 A and E2B epitope. Correspondingly, for the purpose of epitope characterization the human CD22 protein extracellular region was divided into seven parts: V (aa 20-142 as specified in Uniprot P20273+RPFP), C2-1 (aa 143-241 as specified in Uniprot P20273+LNVKHT), C2-2 (aa 242-330 as specified in Uniprot P20273+VQYA), C2-3 (aa 331-418 as specified in Uniprot P20273+YP), C2-4 (aa 419-504 as specified in Uniprot P20273+VQYA), C2-5 (aa 505-592 as specified in Uniprot P20273+KAWTLEVLYA) and C2-6 (aa 593-687 as specified in Uniprot P20273+VYYSPETIGRR). It was surprisingly found that CD22 antigen-binding molecules, both mono and dual targeting, show preferably higher cytotoxic activity when binding to the C2-1 epitope.

[0079] It is particular surprising that a multispecific antigen-binding molecule according to the present invention is capable, despite the short linker between the target binding domains, to bind, preferably simultaneously to two different targets. Simultaneous binding has been demonstrated herein for several targets. However, this is surprising given the typically typical distance between the targets. For example, CD20 comprises two small extra cellular domains of only 13 aa (E1) and 47 aa (E2). In contrast, CD22 comprises a 7 Ig domain long extracellular domain with 676 aa. However, despite the significantly different extracellular size and setup, a multispecific antigen-binding molecule according to the present intention may successfully address both TAAs CD20 and CD22 at the same time for the benefit of increased efficacy and less toxicity. This is preferably achieved if the

[0080] It is envisaged in the context of the present invention, that preferred multispecific antigen-binding molecules do not only show a favorable ratio of cytotoxicity to affinity, but additionally show sufficient stability characteristics in order to facilitate practical handling in formulating, storing and administrating said constructs. Sufficient stability is, for example, characterized by a high monomer content (i.e. non-aggregated and/or non-associated, native molecule) after standard preparation, such as at least 65% as determined by preparative size exclusion chromatography (SEC), more preferably at least 70% and even more preferably at least 75%. Also, the turbidity measured, e.g., at 340 nm as optical absorption at a concentration of 2.5 mg/ml should, preferably, be equal to or lower than 0.025, more preferably 0.020, e.g., in order to conclude to the essential absence of undesired aggregates. Advantageously, high monomer content is maintained after incubation in stress conditions such as freeze/thaw or incubation at 37 or 40° C. Even more, multispecific antigen-binding molecules according to the present invention typically have a thermal stability which is at least comparable or even higher than that of bispecific antigen-binding molecules which have only one target binding domain but otherwise comprise a CD3 binding domain and, optionally, a half-life extending scFc domain, i.e. which are structurally less complex. The skilled person would expect that a more structurally complex protein-based molecule was less prone to thermal and other degradation, i.e. be less thermal stable.

[0081] Thus, the present invention provides a CD20 and CD22 targeting antigen-binding molecule comprising:
[0082] (i.) the first binding domain specifically binds to a first target cell surface antigen (selected anti-CD20 binders),
[0083] (ii.) the second binding domain specifically binds to a second target cell surface antigen (selected anti-CD22 binders), and
[0084] (iii.) the third binding domain binds to an extracellular epitope of the human and/or the Macaca CD3ε chain, wherein the first, second and third binding domain are arranged in an amino to carboxyl order, and wherein the first binding domain and the second binding domain are linked by a peptide linker having a length of 5 to 25, preferably 5 to 18 or 6 to 16 amino acids, and optionally
[0085] (iv.) a fourth domain which comprises two polypeptide monomers, each comprising a hinge, a CH2 and a CH3 domain, wherein said two polypeptide monomers are fused to each other via a peptide linker.
[0086] As a general requirement for the CD20 and CD22 targeting bispecific antigen-binding molecule of the present invention, one target binding domain has to be located adjacently N-terminally to the effector CD3 binding domain in order to act as a bispecific entity and, thereby, form a cytolytic synapse between the—preferably double positive—target cell and the effector T-cell.

[0087] The term “polypeptide” is understood herein as an organic polymer which comprises at least one continuous, unbranched amino acid chain. In the context of the present invention, a polypeptide comprising more than one amino acid chain is likewise envisaged. An amino acid chain of a polypeptide typically comprises at least 50 amino acids, preferably at least 100, 200, 300, 400 or 500 amino acids. It is also envisaged in the context of the present invention that an amino acid chain of a polymer is linked to an entity which is not composed of amino acids.

[0088] The term “antigen-binding polypeptide” according to the present invention is preferably a polypeptide which immunospecifically binds to its target or antigen. It typically comprises the heavy chain variable region (VH) and/or the light chain variable region (VL) of an antibody, or comprises domains derived therefrom. A polypeptide according to the invention comprises the minimum structural requirements of an antibody which allow for immunospecific target binding. This minimum requirement may e.g. be defined by the presence of at least three light chain CDRs (i.e. CDR1, CDR2 and CDR3 of the VL region) and/or three heavy chain CDRs (i.e. CDR1, CDR2 and CDR3 of the VH region), preferably of all six CDRs. A T-cell engaging polypeptide may hence be characterized by the presence of three or six CDRs in either one or both binding domains, and the skilled person knows where (in which order) those CDRs are located within the binding domain. Typically, an “antigen-binding molecule” is understood as an “antigen-binding polypeptide” in the context of the present invention.

[0089] Alternatively, in the context of the present invention, an antigen-binding polypeptide corresponds to an “antibody construct” which typically refers to a molecule in which the structure and/or function is/are based on the structure and/or function of an antibody, e.g., of a full-length or whole immunoglobulin molecule. An antigen-binding molecule is hence capable of binding to its specific target or antigen and/or is/are drawn from the variable heavy chain (VH) and/or variable light chain (VL) domains of an antibody or fragment thereof. Furthermore, the domain which binds to its binding partner according to the present invention is understood herein as a binding domain of an antigen-binding molecule according to the invention. Typically, a binding domain according to the present invention comprises the minimum structural requirements of an antibody which allow for the target binding. This minimum requirement may e.g. be defined by the presence of at least the three light chain CDRs (i.e. CDR1, CDR2 and CDR3 of the VL region) and/or the three heavy chain CDRs (i.e. CDR1, CDR2 and CDR3 of the VH region), preferably of all six CDRs. An alternative approach to define the minimal structure requirements of an antibody is the definition of the epitope of the antibody within the structure of the specific target, respectively, the protein domain of the target protein composing the epitope region (epitope cluster) or by reference to a specific antibody competing with the epitope of the defined antibody. The antibodies on which the constructs according to the invention are based include for example monoclonal, recombinant, chimeric, deimmunized, humanized and human antibodies.

[0090] The binding domain of an antigen-binding molecule according to the invention may e.g. comprise the above referred groups of CDRs. Preferably, those CDRs are comprised in the framework of an antibody light chain variable region (VL) and an antibody heavy chain variable region (VH); however, it does not have to comprise both. Fd fragments, for example, have two VH regions and often retain some antigen-binding function of the intact antigen-binding domain. Additional examples for the format of antibody fragments, antibody variants or binding domains include (1) a Fab fragment, a monovalent fragment having the VL, VH, CL and CH1 domains; (2) a F(ab′)₂ fragment, a bivalent fragment having two Fab fragments linked by a disulfide bridge at the hinge region; (3) an Fd fragment having the two VH and CH1 domains; (4) an Fv fragment having the VL and VH domains of a single arm of an antibody, (5) a dAb fragment (Ward et al., (1989) Nature 341:544-546), which has a VH domain; (6) an isolated complementarity determining region (CDR), and (7) a single chain Fv (scFv), the latter being preferred (for example, derived from an scFV-library). Examples for embodiments of antigen-binding molecules according to the invention are e.g. described in WO 00/006605, WO 2005/040220, WO 2008/119567, WO 2010/037838, WO 2013/026837, WO 2013/026833, US 2014/0308285, US 2014/0302037, WO 2014/144722, WO 2014/151910, and WO 2015/048272.

[0091] Also, within the definition of “binding domain” or “domain which binds” are fragments of full-length antibodies, such as VH, VHH, VL, (s)dAb, Fv, Fd, Fab, Fab′, F(ab′)2 or “r IgG” (“half antibody”). Antigen-binding molecules according to the invention may also comprise modified fragments of antibodies, also called antibody variants, such as scFv, di-scFv or bi(s)-scFv, scFv-Fc, scFv-zipper, scFab, Fab₂, Fab₃, diabodies, single chain diabodies, tandem diabodies (Tandab's), tandem di-scFv, tandem tri-scFv, “multibodies” such as triabodies or tetrabodies, and single domain antibodies such as nanobodies or single variable domain antibodies comprising merely one variable domain, which may be VHH, VH or VL, that specifically bind an antigen or epitope independently of other V regions or domains.

[0092] As used herein, the terms “single-chain Fv,” “single-chain antibodies” or “scFv” refer to single polypeptide chain antibody fragments that comprise the variable regions from both the heavy and light chains, but lack the constant regions. Generally, a single-chain antibody further comprises a polypeptide linker between the VH and VL domains which enables it to form the desired structure which would allow for antigen binding. Single chain antibodies are discussed in detail by Pluckthun in The Pharmacology of Monoclonal Antibodies, vol. 113, Rosenburg and Moore eds. Springer-Verlag, New York, pp. 269-315 (1994). Various methods of generating single chain antibodies are known, including those described in U.S. Pat. Nos. 4,694,778 and 5,260,203; International Patent Application Publication No. WO 88/01649; Bird (1988) Science 242:423-442; Huston et al. (1988) Proc. Natl. Acad. Sci. USA 85:5879-5883; Ward et al. (1989) Nature 334:54454; Skerra et al. (1988) Science 242:1038-1041. In specific embodiments, single-chain antibodies can also be bispecific, multispecific, human, and/or humanized and/or synthetic.

[0093] Furthermore, the definition of the term “antigen-binding molecule” includes preferably polyvalent/multivalent constructs and, thus, bispecific molecules, wherein bispecific means that they specifically bind to two cell typs comprising distinctive antigenic structures, i.e. target cells and effector cells. As the antigen-binding molecules of the present invention are preferably CD20 and CD22 targeting, they are typically as well as polyvalent/multivalent molecules, which specifically bind more than two antigenic structures, preferably. three, through distinct binding domains in the context of the present invention which are two target binding domains and one CD3 binding domain. Moreover, the definition of the term “antigen-binding molecule” includes molecules consisting of only one polypeptide chain as well as molecules consisting of more than one polypeptide chain, which chains can be either identical (homodimers, homotrimers or homo oligomers) or different (heterodimer, heterotrimer or heterooligomer). Such molecules comprising more than one polypeptide chain, i.e. typically two chains, have these chains typically attached to each other as heterodimers via charged pair binding, e.g. within a heteroFc entity which serves as a half-life extending moiety e.g. in C-terminal position of the CD3 binder as described herein. Examples for the above identified antigen-binding molecules, e.g. antibody-based molecules are described inter alia in Harlow and Lane, Antibodies a laboratory manual, CSHL Press (1988) and Using Antibodies: a laboratory manual, CSHL Press (1999), Kontermann and Dübel, Antibody Engineering, Springer, 2nd ed. 2010 and Little, Recombinant Antibodies for Immunotherapy, Cambridge University Press 2009.

[0094] The term “bispecific” as used herein refers to an antigen-binding molecule which is “at least bispecific”, i.e., it addresses two different cell types, i.e. target an effector cells, and comprises at least a first binding domain and a second binding domain, wherein at least one binding domain binds to an antigen or target selected preferably from CS1, BCMA, CD20, CD22, FLT3, CD123, MSLN, CLL1 and EpCAM, and another binding domain of the same molecule binds to another antigen or target (here: CD3). Accordingly, antigen-binding molecules according to the invention comprise specificities for at least two different antigens or targets. For example, one domain does preferably not bind to an extracellular epitope of CD3e of one or more of the species as described herein.

[0095] The term “target cell surface antigen” refers to an antigenic structure expressed by a cell and which is present at the cell surface such that it is accessible for an antigen-binding molecule as described herein. A preferred target cell surface antigen in the context of the present invention is a tumor associated antigen (TAA). It may be a protein, preferably the extracellular portion of a protein, or a carbohydrate structure, preferably a carbohydrate structure of a protein, such as a glycoprotein. It is preferably a tumor antigen. The term “bispecific antigen-binding molecule” of the invention also encompasses multispecific antigen-binding molecules such as trispecific antigen-binding molecules, the latter ones including three binding domains, or constructs having more than three (e.g. four, five . . . ) specificities.

[0096] Preferred in the context of the present invention is a molecule which is “multispecific”, which is understood herein to be “at least bispecific”. In this regard, a multispecific molecule such as an antigen-binding molecule is specific for an effector such as CD3, more preferably CD3e, and at least two target cell surface antigens. Said specificity is conferred by respective binding domains as defined herein. Typically, “multispecific” refers to a molecule which is specific for two different target cell surface effectors as such multi-specificity confers to preferred properties of a multispecific antigen-binding molecule according to the present invention, namely mitigation of antigen loss and increase of the therapeutic window or higher tolerability.

[0097] Given that the antigen-binding molecules according to the invention are (at least) bispecific, they do not occur naturally and they are markedly different from naturally occurring products. A “bispecific” antigen-binding molecule or immunoglobulin is hence an artificial hybrid antibody or immunoglobulin having at least two distinct binding sides with different specificities. Bispecific antigen-binding molecules can be produced by a variety of methods including fusion of hybridomas or linking of Fab′ fragments. See, e.g., Songsivilai & Lachmann, Clin. Exp. Immunol. 79:315-321 (1990).

[0098] The at least three binding domains and the variable domains (VH/VL) of the antigen-binding molecule of the present invention typically comprise peptide linkers (spacer peptides). The term “peptide linker” comprises in accordance with the present invention an amino acid sequence by which the amino acid sequences of one (variable and/or binding) domain and another (variable and/or binding) domain of the antigen-binding molecule of the invention are linked with each other. The peptide linker between the first and the second binding domain, which are capable to bind simultaneously to two targets, which are preferably different targets (e.g. TAA1 and TAA2), are preferably flexible and of limited length, e.g. of 5, 6, 7, 8, 9, 10, 11, 12, 13, 14, 15, 16, 17 or 18 amino acids. The peptide linkers can also be used to fuse the third domain to the other domains of the antigen-binding molecule of the invention. An essential technical feature of such peptide linker is that it does not comprise any polymerization activity. Among the suitable peptide linkers are those described in U.S. Pat. Nos. 4,751,180 and 4,935,233 or WO 88/09344. The peptide linkers can also be used to attach other domains or modules or regions (such as half-life extending domains) to the antigen-binding molecule of the invention. However, typically the linker between the first and the second target binding domain differs from the intra-binder linker which links the VH and VL within the target binding domain. Said difference is the linker between the fist and the second binding domain having one amino acid more than intra-binder linkers, e.g. six and five amino acids, respectively, such as SGGGGS versus GGGGS. This confers surprisingly flexibility and stability at the same time in the specific antigen-binding molecule format as described herein.

[0099] The antigen-binding molecules of the present invention are preferably “in vitro generated antigen-binding molecules”. This term refers to an antigen-binding molecule according to the above definition where all or part of the variable region (e.g., at least one CDR) is generated in a non-immune cell selection, e.g., an in vitro phage display, protein chip or any other method in which candidate sequences can be tested for their ability to bind to an antigen. This term thus preferably excludes sequences generated solely by genomic rearrangement in an immune cell in an animal. A “recombinant antibody” is an antibody made through the use of recombinant DNA technology or genetic engineering.

[0100] The term “monoclonal antibody” (mAb) or monoclonal antigen-binding molecule as used herein refers to an antibody obtained from a population of substantially homogeneous antibodies, i.e., the individual antibodies comprising the population are identical except for possible naturally occurring mutations and/or post-translation modifications (e.g., isomerizations, amidations) that may be present in minor amounts. Monoclonal antibodies are highly specific, being directed against a single antigenic side or determinant on the antigen, in contrast to conventional (polyclonal) antibody preparations which typically include different antibodies directed against different determinants (or epitopes). In addition to their specificity, the monoclonal antibodies are advantageous in that they are synthesized by the hybridoma culture, hence uncontaminated by other immunoglobulins. The modifier “monoclonal” indicates the character of the antibody as being obtained from a substantially homogeneous population of antibodies, and is not to be construed as requiring production of the antibody by any particular method.

[0101] For the preparation of monoclonal antibodies, any technique providing antibodies produced by continuous cell line cultures can be used. For example, monoclonal antibodies to be used may be made by the hybridoma method first described by Koehler et al., Nature, 256: 495 (1975), or may be made by recombinant DNA methods (see, e.g., U.S. Pat. No. 4,816,567). Examples for further techniques to produce human monoclonal antibodies include the trioma technique, the human B-cell hybridoma technique (Kozbor, Immunology Today 4 (1983), 72) and the EBV-hybridoma technique (Cole et al., Monoclonal Antibodies and Cancer Therapy, Alan R. Liss, Inc. (1985), 77⁻⁹⁶).

[0102] Hybridomas can then be screened using standard methods, such as enzyme-linked immunosorbent assay (ELISA) and surface plasmon resonance analysis, e.g. Biacore™ to identify one or more hybridomas that produce an antibody that specifically binds with a specified antigen. Any form of the relevant antigen may be used as the immunogen, e.g., recombinant antigen, naturally occurring forms, any variants or fragments thereof, as well as an antigenic peptide thereof. Surface plasmon resonance as employed in the Biacore system can be used to increase the efficiency of phage antibodies which bind to an epitope of a target cell surface antigen (Schier, Human Antibodies Hybridomas 7 (1996), 97-105; Malmborg, J. Immunol. Methods 183 (1995), 7-13).

[0103] Another exemplary method of making monoclonal antibodies includes screening protein expression libraries, e.g., phage display or ribosome display libraries. Phage display is described, for example, in Ladner et al., U.S. Pat. No. 5,223,409; Smith (1985) Science 228:1315-1317, Clackson et al., Nature, 352: 624-628 (1991) and Marks et al., J. Mol. Biol., 222: 581-597 (1991).

[0104] In addition to the use of display libraries, the relevant antigen can be used to immunize a non-human animal, e.g., a rodent (such as a mouse, hamster, rabbit or rat). In one embodiment, the non-human animal includes at least a part of a human immunoglobulin gene. For example, it is possible to engineer mouse strains deficient in mouse antibody production with large fragments of the human Ig (immunoglobulin) loci. Using the hybridoma technology, antigen-specific monoclonal antibodies derived from the genes with the desired specificity may be produced and selected. See, e.g., XENOMOUSE™, Green et al. (1994) Nature Genetics 7:13-21, US 2003-0070185, WO 96/34096, and WO 96/33735.

[0105] A monoclonal antibody can also be obtained from a non-human animal, and then modified, e.g., humanized, deimmunized, rendered chimeric etc., using recombinant DNA techniques known in the art. Examples of modified antigen-binding molecules include humanized variants of non-human antibodies, “affinity matured” antibodies (see, e.g. Hawkins et al. J. Mol. Biol. 254, 889-896 (1992) and Lowman et al., Biochemistry 30, 10832-10837 (1991)) and antibody mutants with altered effector function(s) (see, e.g., U.S. Pat. No. 5,648,260, Kontermann and Dübel (2010), loc. cit. and Little (2009), loc. cit.).

[0106] In immunology, affinity maturation is the process by which B cells produce antibodies with increased affinity for antigen during the course of an immune response. With repeated exposures to the same antigen, a host will produce antibodies of successively greater affinities. Like the natural prototype, the in vitro affinity maturation is based on the principles of mutation and selection. The in vitro affinity maturation has successfully been used to optimize antibodies, antigen-binding molecules, and antibody fragments. Random mutations inside the CDRs are introduced using radiation, chemical mutagens or error-prone PCR. In addition, the genetic diversity can be increased by chain shuffling. Two or three rounds of mutation and selection using display methods like phage display usually results in antibody fragments with affinities in the low nanomolar range.

[0107] A preferred type of an amino acid substitutional variation of the antigen-binding molecules involves substituting one or more hypervariable region residues of a parent antibody (e. g. a humanized or human antibody). Generally, the resulting variant(s) selected for further development will have improved biological properties relative to the parent antibody from which they are generated. A convenient way for generating such substitutional variants involves affinity maturation using phage display. Briefly, several hypervariable region sides (e. g. 6-7 sides) are mutated to generate all possible amino acid substitutions at each side. The antibody variants thus generated are displayed in a monovalent fashion from filamentous phage particles as fusions to the gene III product of M13 packaged within each particle. The phage-displayed variants are then screened for their biological activity (e. g. binding affinity) as herein disclosed. In order to identify candidate hypervariable region sides for modification, alanine scanning mutagenesis can be performed to identify hypervariable region residues contributing significantly to antigen binding. Alternatively, or additionally, it may be beneficial to analyze a crystal structure of the antigen-antibody complex to identify contact points between the binding domain and, e.g., human CS1, BCMA, CD20, CD22, FLT3, CD123, MSLN, CLL1 or EpCAM. Such contact residues and neighbouring residues are candidates for substitution according to the techniques elaborated herein. Once such variants are generated, the panel of variants is subjected to screening as described herein and antibodies with superior properties in one or more relevant assays may be selected for further development.

[0108] The monoclonal antibodies and antigen-binding molecules of the present invention specifically include “chimeric” antibodies (immunoglobulins) in which a portion of the heavy and/or light chain is identical with or homologous to corresponding sequences in antibodies derived from a particular species or belonging to a particular antibody class or subclass, while the remainder of the chain(s) is/are identical with or homologous to corresponding sequences in antibodies derived from another species or belonging to another antibody class or subclass, as well as fragments of such antibodies, so long as they exhibit the desired biological activity (U.S. Pat. No. 4,816,567; Morrison et al., Proc. Natl. Acad. Sci. USA, 81: 6851-6855 (1984)). Chimeric antibodies of interest herein include “primitized” antibodies comprising variable domain antigen-binding sequences derived from a non-human primate (e.g., Old World Monkey, Ape etc.) and human constant region sequences. A variety of approaches for making chimeric antibodies have been described. See e.g., Morrison et al., Proc. Natl. Acad. ScL U.S.A. 81:6851, 1985; Takeda et al., Nature 314:452, 1985, Cabilly et al., U.S. Pat. No. 4,816,567; Boss et al., U.S. Pat. No. 4,816,397; Tanaguchi et al., EP 0171496; EP 0173494; and GB 2177096.

[0109] An antibody, antigen-binding molecule, antibody fragment or antibody variant may also be modified by specific deletion of human T cell epitopes (a method called “deimmunization”) by the methods disclosed for example in WO 98/52976 or WO 00/34317. Briefly, the heavy and light chain variable domains of an antibody can be analyzed for peptides that bind to MHC class II; these peptides represent potential T cell epitopes (as defined in WO 98/52976 and WO 00/34317). For detection of potential T cell epitopes, a computer modeling approach termed “peptide threading” can be applied, and in addition a database of human MHC class II binding peptides can be searched for motifs present in the VH and VL sequences, as described in WO 98/52976 and WO 00/34317. These motifs bind to any of the 18 major MHC class II DR allotypes, and thus constitute potential T cell epitopes. Potential T cell epitopes detected can be eliminated by substituting small numbers of amino acid residues in the variable domains, or preferably, by single amino acid substitutions. Typically, conservative substitutions are made. Often, but not exclusively, an amino acid common to a position in human germline antibody sequences may be used. Human germline sequences are disclosed e.g. in Tomlinson, et al. (1992) J. MoI. Biol. 227:776-798; Cook, G. P. et al. (1995) Immunol. Today Vol. 16 (5): 237-242; and Tomlinson et al. (1995) EMBO J. 14: 14:4628-4638. The V BASE directory provides a comprehensive directory of human immunoglobulin variable region sequences (compiled by Tomlinson, L A. et al. MRC Centre for Protein Engineering, Cambridge, UK). These sequences can be used as a source of human sequence, e.g., for framework regions and CDRs. Consensus human framework regions can also be used, for example as described in U.S. Pat. No. 6,300,064.

[0110] “Humanized” antibodies, antigen-binding molecules, variants or fragments thereof (such as Fv, Fab, Fab′, F(ab′)2 or other antigen-binding subsequences of antibodies) are antibodies or immunoglobulins of mostly human sequences, which contain (a) minimal sequence(s) derived from non-human immunoglobulin. For the most part, humanized antibodies are human immunoglobulins (recipient antibody) in which residues from a hypervariable region (also CDR) of the recipient are replaced by residues from a hypervariable region of a non-human (e.g., rodent) species (donor antibody) such as mouse, rat, hamster or rabbit having the desired specificity, affinity, and capacity. In some instances, Fv framework region (FR) residues of the human immunoglobulin are replaced by corresponding non-human residues. Furthermore, “humanized antibodies” as used herein may also comprise residues which are found neither in the recipient antibody nor the donor antibody. These modifications are made to further refine and optimize antibody performance. The humanized antibody may also comprise at least a portion of an immunoglobulin constant region (Fc), typically that of a human immunoglobulin. For further details, see Jones et al., Nature, 321: 522-525 (1986); Reichmann et al., Nature, 332: 323-329 (1988); and Presta, Curr. Op. Struct. Biol., 2: 593-596 (1992).

[0111] Humanized antibodies or fragments thereof can be generated by replacing sequences of the Fv variable domain that are not directly involved in antigen binding with equivalent sequences from human Fv variable domains. Exemplary methods for generating humanized antibodies or fragments thereof are provided by Morrison (1985) Science 229:1202-1207; by Oi et al. (1986) BioTechniques 4:214; and by U.S. Pat. Nos. 5,585,089; 5,693,761; 5,693,762; 5,859,205; and 6,407,213. Those methods include isolating, manipulating, and expressing the nucleic acid sequences that encode all or part of immunoglobulin Fv variable domains from at least one of a heavy or light chain. Such nucleic acids may be obtained from a hybridoma producing an antibody against a predetermined target, as described above, as well as from other sources. The recombinant DNA encoding the humanized antibody molecule can then be cloned into an appropriate expression vector.

[0112] Humanized antibodies may also be produced using transgenic animals such as mice that express human heavy and light chain genes, but are incapable of expressing the endogenous mouse immunoglobulin heavy and light chain genes. Winter describes an exemplary CDR grafting method that may be used to prepare the humanized antibodies described herein (U.S. Pat. No. 5,225,539). All of the CDRs of a particular human antibody may be replaced with at least a portion of a non-human CDR, or only some of the CDRs may be replaced with non-human CDRs. It is only necessary to replace the number of CDRs required for binding of the humanized antibody to a predetermined antigen.

[0113] A humanized antibody can be optimized by the introduction of conservative substitutions, consensus sequence substitutions, germline substitutions and/or back mutations. Such altered immunoglobulin molecules can be made by any of several techniques known in the art, (e.g., Teng et al., Proc. Natl. Acad. Sci. U.S.A., 80: 7308-7312, 1983; Kozbor et al., Immunology Today, 4: 7279, 1983; Olsson et al., Meth. Enzymol., 92: 3-16, 1982, and EP 239 400).

[0114] The term “human antibody”, “human antigen-binding molecule” and “human binding domain” includes antibodies, antigen-binding molecules and binding domains having antibody regions such as variable and constant regions or domains which correspond substantially to human germline immunoglobulin sequences known in the art, including, for example, those described by Kabat et al. (1991) (loc. cit.). The human antibodies, antigen-binding molecules or binding domains of the invention may include amino acid residues not encoded by human germline immunoglobulin sequences (e.g., mutations introduced by random or site-specific mutagenesis in vitro or by somatic mutation in vivo), for example in the CDRs, and in particular, in CDR3. The human antibodies, antigen-binding molecules or binding domains can have at least one, two, three, four, five, or more positions replaced with an amino acid residue that is not encoded by the human germline immunoglobulin sequence. The definition of human antibodies, antigen-binding molecules and binding domains as used herein also contemplates fully human antibodies, which include only non-artificially and/or genetically altered human sequences of antibodies as those can be derived by using technologies or systems such as the Xenomouse. Preferably, a “fully human antibody” does not include amino acid residues not encoded by human germline immunoglobulin sequences.

[0115] In some embodiments, the antigen-binding molecules of the invention are “isolated” or “substantially pure” antigen-binding molecules. “Isolated” or “substantially pure”, when used to describe the antigen-binding molecules disclosed herein, means an antigen-binding molecule that has been identified, separated and/or recovered from a component of its production environment. Preferably, the antigen-binding molecule is free or substantially free of association with all other components from its production environment. Contaminant components of its production environment, such as that resulting from recombinant transfected cells, are materials that would typically interfere with diagnostic or therapeutic uses for the polypeptide, and may include enzymes, hormones, and other proteinaceous or non-proteinaceous solutes. The antigen-binding molecules may e.g. constitute at least about 5%, or at least about 50% by weight of the total protein in a given sample. It is understood that the isolated protein may constitute from 5% to 99.9% by weight of the total protein content, depending on the circumstances. The polypeptide may be made at a significantly higher concentration through the use of an inducible promoter or high expression promoter, such that it is made at increased concentration levels. The definition includes the production of an antigen-binding molecule in a wide variety of organisms and/or host cells that are known in the art. In preferred embodiments, the antigen-binding molecule will be purified (1) to a degree sufficient to obtain at least 15 residues of N-terminal or internal amino acid sequence by use of a spinning cup sequenator, or (2) to homogeneity by SDS-PAGE under non-reducing or reducing conditions using Coomassie blue or, preferably, silver stain. Ordinarily, however, an isolated antigen-binding molecule will be prepared by at least one purification step.

[0116] The term “binding domain” characterizes in connection with the present invention a domain which (specifically) binds to/interacts with/recognizes a given target epitope or a given target side on the target molecules (antigens), e.g. CD20 and CD22, and CD3, respectively. The structure and function of the first and/or second binding domain (recognizing CD20 and CD22), and preferably also the structure and/or function of the effector binding domain (typically the third binding domain recognizing CD3), is/are based on the structure and/or function of an antibody, e.g. of a full-length or whole immunoglobulin molecule, and/or is/are drawn from the variable heavy chain (VH) and/or variable light chain (VL) domains of an antibody or fragment thereof. Preferably the target cell surface antigen(s) binding domain(s) is/are characterized by the presence of three light chain CDRs (i.e. CDR1, CDR2 and CDR3 of the VL region) and/or three heavy chain CDRs (i.e. CDR1, CDR2 and CDR3 of the VH region). The effector (typically CD3) binding domain preferably also comprises the minimum structural requirements of an antibody which allow for the target binding. More preferably, the second binding domain comprises at least three light chain CDRs (i.e. CDR1, CDR2 and CDR3 of the VL region) and/or three heavy chain CDRs (i.e. CDR1, CDR2 and CDR3 of the VH region). It is envisaged that the first and/or second binding domain is produced by or obtainable by phage-display or library screening methods rather than by grafting CDR sequences from a pre-existing (monoclonal) antibody into a scaffold.

[0117] According to the present invention, binding domains are in the form of one or more polypeptides. Such polypeptides may include proteinaceous parts and non-proteinaceous parts (e.g. chemical linkers or chemical cross-linking agents such as glutaraldehyde). Proteins (including fragments thereof, preferably biologically active fragments, and peptides, usually having less than 30 amino acids) comprise two or more amino acids coupled to each other via a covalent peptide bond (resulting in a chain of amino acids).

[0118] The term “polypeptide” as used herein describes a group of molecules, which usually consist of more than 30 amino acids. Polypeptides may further form multimers such as dimers, trimers and higher oligomers, i.e., consisting of more than one polypeptide molecule. Polypeptide molecules forming such dimers, trimers etc. may be identical or non-identical. The corresponding higher order structures of such multimers are, consequently, termed homo- or heterodimers, homo- or heterotrimers etc. An example for a heteromultimer is an antibody molecule, which, in its naturally occurring form, consists of two identical light polypeptide chains and two identical heavy polypeptide chains. The terms “peptide”, “polypeptide” and “protein” also refer to naturally modified peptides/polypeptides/proteins wherein the modification is effected e.g. by post-translational modifications like glycosylation, acetylation, phosphorylation and the like. A “peptide”, “polypeptide” or “protein” when referred to herein may also be chemically modified such as pegylated. Such modifications are well known in the art and described herein below.

[0119] Preferably the binding domain which binds to any of CS1, BCMA, CD20, CD22, FLT3, CD123, CLL1, MSLN, and EpCAM, and/or the binding domain which binds to CD3ε is/are human binding domains. Antibodies and antigen-binding molecules comprising at least one human binding domain avoid some of the problems associated with antibodies or antigen-binding molecules that possess non-human such as rodent (e.g. murine, rat, hamster or rabbit) variable and/or constant regions. The presence of such rodent derived proteins can lead to the rapid clearance of the antibodies or antigen-binding molecules or can lead to the generation of an immune response against the antibody or antigen-binding molecule by a patient. In order to avoid the use of rodent derived antibodies or antigen-binding molecules, human or fully human antibodies/antigen-binding molecules can be generated through the introduction of human antibody function into a rodent so that the rodent produces fully human antibodies.

[0120] The ability to clone and reconstruct megabase-sized human loci in yeast artificial chromosomes YACs and to introduce them into the mouse germline provides a powerful approach to elucidating the functional components of very large or crudely mapped loci as well as generating useful models of human disease. Furthermore, the use of such technology for substitution of mouse loci with their human equivalents could provide unique insights into the expression and regulation of human gene products during development, their communication with other systems, and their involvement in disease induction and progression.

[0121] An important practical application of such a strategy is the “humanization” of the mouse humoral immune system. Introduction of human immunoglobulin (Ig) loci into mice in which the endogenous Ig genes have been inactivated offers the opportunity to study the mechanisms underlying programmed expression and assembly of antibodies as well as their role in B-cell development. Furthermore, such a strategy could provide an ideal source for production of fully human monoclonal antibodies (mAbs)—an important milestone towards fulfilling the promise of antibody therapy in human disease. Fully human antibodies or antigen-binding molecules are expected to minimize the immunogenic and allergic responses intrinsic to mouse or mouse-derivatized mAbs and thus to increase the efficacy and safety of the administered antibodies/antigen-binding molecules. The use of fully human antibodies or antigen-binding molecules can be expected to provide a substantial advantage in the treatment of chronic and recurring human diseases, such as inflammation, autoimmunity, and cancer, which require repeated compound administrations.

[0122] One approach towards this goal was to engineer mouse strains deficient in mouse antibody production with large fragments of the human Ig loci in anticipation that such mice would produce a large repertoire of human antibodies in the absence of mouse antibodies. Large human Ig fragments would preserve the large variable gene diversity as well as the proper regulation of antibody production and expression. By exploiting the mouse machinery for antibody diversification and selection and the lack of immunological tolerance to human proteins, the reproduced human antibody repertoire in these mouse strains should yield high affinity antibodies against any antigen of interest, including human antigens. Using the hybridoma technology, antigen-specific human mAbs with the desired specificity could be readily produced and selected. This general strategy was demonstrated in connection with the generation of the first XenoMouse mouse strains (see Green et al. Nature Genetics 7:13-21 (1994)). The XenoMouse strains were engineered with YACs containing 245 kb and 190 kb-sized germline configuration fragments of the human heavy chain locus and kappa light chain locus, respectively, which contained core variable and constant region sequences. The human Ig containing YACs proved to be compatible with the mouse system for both rearrangement and expression of antibodies and were capable of substituting for the inactivated mouse Ig genes. This was demonstrated by their ability to induce B cell development, to produce an adult-like human repertoire of fully human antibodies, and to generate antigen-specific human mAbs. These results also suggested that introduction of larger portions of the human Ig loci containing greater numbers of V genes, additional regulatory elements, and human Ig constant regions may recapitulate substantially the full repertoire that is characteristic of the human humoral response to infection and immunization. The work of Green et al. was recently extended to the introduction of greater than approximately 80% of the human antibody repertoire through introduction of megabase sized, germline configuration YAC fragments of the human heavy chain loci and kappa light chain loci, respectively. See Mendez et al. Nature Genetics 15:146-156 (1997) and U.S. patent application Ser. No. 08/759,620.

[0123] The production of the XenoMouseanimals is further discussed and delineated in U.S. patent application Ser. No. 07/466,008, Ser. No. 07/610,515, Ser. No. 07/919,297, Ser. No. 07/922,649, Ser. No. 08/031,801, Ser. No. 08/112,848, Ser. No. 08/234,145, Ser. No. 08/376,279, Ser. No. 08/430,938, Ser. No. 08/464,584, Ser. No. 08/464,582, Ser. No. 08/463,191, Ser. No. 08/462,837, Ser. No. 08/486,853, Ser. No. 08/486,857, Ser. No. 08/486,859, Ser. No. 08/462,513, Ser. No. 08/724,752, and Ser. No. 08/759,620; and U.S. Pat. Nos. 6,162,963; 6,150,584; 6,114,598; 6,075,181, and 5,939,598 and Japanese Patent Nos. 3 068 180 B2, 3 068 506 B2, and 3 068 507 B2. See also Mendez et al. Nature Genetics 15:146-156 (1997) and Green and Jakobovits J. Exp. Med. 188:483-495 (1998), EP 0 463 151 B1, WO 94/02602, WO 96/34096, WO 98/24893, WO 00/76310, and WO 03/47336.

[0124] In an alternative approach, others, including GenPharm International, Inc., have utilized a “minilocus” approach. In the minilocus approach, an exogenous Ig locus is mimicked through the inclusion of pieces (individual genes) from the Ig locus. Thus, one or more VH genes, one or more DH genes, one or more JH genes, a mu constant region, and a second constant region (preferably a gamma constant region) are formed into a construct for insertion into an animal. This approach is described in U.S. Pat. No. 5,545,807 to Surani et al. and U.S. Pat. Nos. 5,545,806; 5,625,825; 5,625,126; 5,633,425; 5,661,016; 5,770,429; 5,789,650; 5,814,318; 5,877,397; 5,874,299; and 6,255,458 each to Lonberg and Kay, U.S. Pat. Nos. 5,591,669 and 6,023,010 to Krimpenfort and Berns, U.S. Pat. Nos. 5,612,205; 5,721,367; and U.S. Pat. No. 5,789,215 to Berns et al., and U.S. Pat. No. 5,643,763 to Choi and Dunn, and GenPharm International U.S. patent application Ser. No. 07/574,748, Ser. No. 07/575,962, Ser. No. 07/810,279, Ser. No. 07/853,408, Ser. No. 07/904,068, Ser. No. 07/990,860, Ser. No. 08/053,131, Ser. No. 08/096,762, Ser. No. 08/155,301, Ser. No. 08/161,739, Ser. No. 08/165,699, Ser. No. 08/209,741. See also EP 0 546 073 B1, WO 92/03918, WO 92/22645, WO 92/22647, WO 92/22670, WO 93/12227, WO 94/00569, WO 94/25585, WO 96/14436, WO 97/13852, and WO 98/24884 and U.S. Pat. No. 5,981,175. See further Taylor et al. (1992), Chen et al. (1993), Tuaillon et al. (1993), Choi et al. (1993), Lonberg et al. (1994), Taylor et al. (1994), and Tuaillon et al. (1995), Fishwild et al. (1996).

[0125] Kirin has also demonstrated the generation of human antibodies from mice in which, through microcell fusion, large pieces of chromosomes, or entire chromosomes, have been introduced. See European Patent Application Nos. 773 288 and 843 961. Xenerex Biosciences is developing a technology for the potential generation of human antibodies. In this technology, SCID mice are reconstituted with human lymphatic cells, e.g., B and/or T cells. Mice are then immunized with an antigen and can generate an immune response against the antigen. See U.S. Pat. Nos. 5,476,996; 5,698,767; and 5,958,765.

[0126] Human anti-mouse antibody (HAMA) responses have led the industry to prepare chimeric or otherwise humanized antibodies. It is however expected that certain human anti-chimeric antibody (HACA) responses will be observed, particularly in chronic or multi-dose utilizations of the antibody. Thus, it would be desirable to provide antigen-binding molecules comprising a human binding domain against CS1, BCMA, CD20, CD22, FLT3, CD123, CLL1, MSLN, CDH3 or EpCAM and a human binding domain against CD3ε in order to vitiate concerns and/or effects of HAMA or HACA response.

[0127] The terms “(specifically) or (immune-specifically) binds to”, (specifically) recognizes”, “is (specifically) directed to”, and “(specifically) reacts with” mean in accordance with this invention that a binding domain, preferably by means of its paratope, interacts or specifically interacts with a given epitope or a given target side on the target molecules (antigens), here preferably CS1, BCMA, CD20, CD22, FLT3, CD123, CLL1, MSLN, CDH3 or EpCAM, and CD3s, respectively.

[0128] In the context of the present invention, a paratope is understood as an antigen-binding site which is a part of a polypeptide as described herein and which recognizes and binds to an antigen. A paratope is typically a small region of about at least 5 amino acids. A paratope as understood herein typically comprises parts of antibody-derived heavy (VH) and light chain (VL) sequences. Each binding domain of a polypeptide according to the present invention is provided with a paratope comprising a set of 6 complementarity-determining regions (CDR loops) with three of each being comprised within the antibody-derived VH and VL sequence, respectively.

[0129] In the context of the present invention, an antigen-binding molecule, i.e. preferably a polypeptide, of the present invention binds to its respective target structure in a particular manner. Preferably, a polypeptide according to the present invention comprises one paratope per binding domain which specifically or immunospecifically binds to”, “(specifically or immunospecifically) recognizes”, or “(specifically or immunospecifically) reacts with” its respective target structure. This means in accordance with this invention that a polypeptide or a binding domain thereof interacts or (immuno-)specifically interacts with a given epitope on the target molecule (antigen) and CD3, respectively. This interaction or association occurs more frequently, more rapidly, with greater duration, with greater affinity, or with some combination of these parameters, to an epitope on the specific target than to alternative substances (non-target molecules). Because of the sequence similarity between homologous proteins in different species, an antibody construct or a binding domain that immunspecifically binds to its target (such as a human target) may, however, cross-react with homologous target molecules from different species (such as, from non-human primates). The term “specific/immunospecific binding” can hence include the binding of an antibody construct or binding domain to epitopes and/or structurally related epitopes in more than one species. The term “(immuno-) selectively binds does exclude the binding to structurally related epitopes.

[0130] The term “epitope” refers to a side on an antigen to which a binding domain, such as an antibody or immunoglobulin, or a derivative, fragment or variant of an antibody or an immunoglobulin, specifically binds. An “epitope” is antigenic and thus the term epitope is sometimes also referred to herein as “antigenic structure” or “antigenic determinant”. Thus, the binding domain is an “antigen interaction side”. Said binding/interaction is also understood to define a “specific recognition”.

[0131] “Epitopes” can be formed both by contiguous amino acids or non-contiguous amino acids juxtaposed by tertiary folding of a protein. A “linear epitope” is an epitope where an amino acid primary sequence comprises the recognized epitope. A linear epitope typically includes at least 3 or at least 4, and more usually, at least 5 or at least 6 or at least 7, for example, about 8 to about 10 amino acids in a unique sequence.

[0132] A “conformational epitope”, in contrast to a linear epitope, is an epitope wherein the primary sequence of the amino acids comprising the epitope is not the sole defining component of the epitope recognized (e.g., an epitope wherein the primary sequence of amino acids is not necessarily recognized by the binding domain). Typically, a conformational epitope comprises an increased number of amino acids relative to a linear epitope. With regard to recognition of conformational epitopes, the binding domain recognizes a three-dimensional structure of the antigen, preferably a peptide or protein or fragment thereof (in the context of the present invention, the antigenic structure for one of the binding domains is comprised within the target cell surface antigen protein). For example, when a protein molecule folds to form a three-dimensional structure, certain amino acids and/or the polypeptide backbone forming the conformational epitope become juxtaposed enabling the antibody to recognize the epitope. Methods of determining the conformation of epitopes include, but are not limited to, x-ray crystallography, two-dimensional nuclear magnetic resonance (2D-NMR) spectroscopy and site-directed spin labelling and electron paramagnetic resonance (EPR) spectroscopy.

[0133] A method for epitope mapping is described in the following: When a region (a contiguous amino acid stretch) in the human CD20 and CD22 protein is exchanged or replaced with its corresponding region of a non-human and non-primate CD20 and CD22 (e.g., mouse CD20 and CD22, but others like chicken, rat, hamster, rabbit etc. may also be conceivable), a decrease in the binding of the binding domain is expected to occur, unless the binding domain is cross-reactive for the non-human, non-primate CD20 and CD22, used. Said decrease is preferably at least 10%, 20%, 30%, 40%, or 50%; more preferably at least 60%, 70%, or 80%, and most preferably 90%, 95% or even 100% in comparison to the binding to the respective region in the human CD20 and CD22CD20 and CD22 protein, whereby binding to the respective region in the human CD20 and CD22 protein is set to be 100%. It is envisaged that the aforementioned human CD20 and CD22/non-human CD20 and CD22 chimeras are expressed in CHO cells. It is also envisaged that the human CD20 and CD22/non-human CD20 and CD22 chimeras are fused with a transmembrane domain and/or cytoplasmic domain of a different membrane-bound protein such as EpCAM.

[0134] In an alternative or additional method for epitope mapping, several truncated versions of the human CD20 and CD22 extracellular domain can be generated in order to determine a specific region that is recognized by a binding domain. In these truncated versions, the different extracellular CD20 and CD22 domains/sub-domains or regions are stepwise deleted, starting from the N-terminus. It is envisaged that the truncated CD20 and CD22 versions may be expressed in CHO cells. It is also envisaged that the truncated CD20 and CD22 versions may be fused with a transmembrane domain and/or cytoplasmic domain of a different membrane-bound protein such as EpCAM. It is also envisaged that the truncated CD20 and CD22 versions may encompass a signal peptide domain at their N-terminus, for example a signal peptide derived from mouse IgG heavy chain signal peptide. It is furthermore envisaged that the truncated CD20 and CD22 versions may encompass a v5 domain at their N-terminus (following the signal peptide) which allows verifying their correct expression on the cell surface. A decrease or a loss of binding is expected to occur with those truncated CD20 and CD22 versions which do not encompass any more the CD20 and CD22 region that is recognized by the binding domain. The decrease of binding is preferably at least 10%, 20%, 30%, 40%, 50%; more preferably at least 60%, 70%, 80%, and most preferably 90%, 95% or even 100%, whereby binding to the entire human CD20 and CD22 protein (or its extracellular region or domain) is set to be 100.

[0135] A further method to determine the contribution of a specific residue of CD20 and CD22 to the recognition by an antigen-binding molecule or binding domain is alanine scanning (see e.g. Morrison K L & Weiss G A. Cur Opin Chem Biol. 2001 June; 5(3):302-7), where each residue to be analyzed is replaced by alanine, e.g. via site-directed mutagenesis. Alanine is used because of its non-bulky, chemically inert, methyl functional group that nevertheless mimics the secondary structure references that many of the other amino acids possess. Sometimes bulky amino acids such as valine or leucine can be used in cases where conservation of the size of mutated residues is desired. Alanine scanning is a mature technology which has been used for a long period of time.

[0136] The interaction between the binding domain and the epitope or the region comprising the epitope implies that a binding domain exhibits appreciable affinity for the epitope/the region comprising the epitope on a particular protein or antigen (here: CD20 and CD22, and CD3, respectively) and, generally, does not exhibit significant reactivity with proteins or antigens other than the, CD20 and CD22, or CD3. “Appreciable affinity” includes binding with an affinity of about 10⁻⁶ M (KD) or stronger. Preferably, binding is considered specific when the binding affinity is about 10⁻¹² to 10⁻⁸ M, 10⁻¹² to 10⁻⁹ M, 10⁻¹² to 10⁻¹⁰ M, 10⁻¹¹ to 10⁻⁸ M, preferably of about 10⁻¹¹ to 10⁻⁹ M. Whether a binding domain specifically reacts with or binds to a target can be tested readily by, inter alia, comparing the reaction of said binding domain with a target protein or antigen with the reaction of said binding domain with proteins or antigens other than the CD20, CD22, or CD3. Preferably, a binding domain of the invention does not essentially or substantially bind to proteins or antigens other than CD20 and CD22or CD3 (i.e., the first binding domain is not capable of binding to proteins other than CD20 and the second binding domain is not capable of binding to proteins other than CD22). It is an envisaged characteristic of the antigen-binding molecules according to the present invention to have superior affinity characteristics in comparison to other HLE formats. Such a superior affinity, in consequence, suggests a prolonged half-life in vivo. The longer half-life of the antigen-binding molecules according to the present invention may reduce the duration and frequency of administration which typically contributes to improved patient compliance. This is of particular importance as the antigen-binding molecules of the present invention are particularly beneficial for highly weakened or even multimorbid cancer patients.

[0137] The term “does not essentially/substantially bind” or “is not capable of binding” means that a binding domain of the present invention does not bind a protein or antigen other than the CD20 and CD22or CD3, i.e., does not show reactivity of more than 30%, preferably not more than 20%, more preferably not more than 10%, particularly preferably not more than 9%, 8%, 7%, 6% or 5% with proteins or antigens other than CD20, CD22, or CD3, whereby binding to the CD20, CD22, or CD3, respectively, is set to be 100%.

[0138] Specific binding is believed to be effected by specific motifs in the amino acid sequence of the binding domain and the antigen. Thus, binding is achieved as a result of their primary, secondary and/or tertiary structure as well as the result of secondary modifications of said structures. The specific interaction of the antigen-interaction-side with its specific antigen may result in a simple binding of said side to the antigen. Moreover, the specific interaction of the antigen-interaction-side with its specific antigen may alternatively or additionally result in the initiation of a signal, e.g. due to the induction of a change of the conformation of the antigen, an oligomerization of the antigen, etc.

[0139] The term “variable” refers to the portions of the antibody or immunoglobulin domains that exhibit variability in their sequence and that are involved in determining the specificity and binding affinity of a particular antibody (i.e., the “variable domain(s)”). The pairing of a variable heavy chain (VH) and a variable light chain (VL) together forms a single antigen-binding site.

[0140] Variability is not evenly distributed throughout the variable domains of antibodies; it is concentrated in sub-domains of each of the heavy and light chain variable regions. These sub-domains are called “hypervariable regions” or “complementarity determining regions” (CDRs). The more conserved (i.e., non-hypervariable) portions of the variable domains are called the “framework” regions (FRM or FR) and provide a scaffold for the six CDRs in three dimensional space to form an antigen-binding surface. The variable domains of naturally occurring heavy and light chains each comprise four FRM regions (FR1, FR2, FR3, and FR4), largely adopting a R-sheet configuration, connected by three hypervariable regions, which form loops connecting, and in some cases forming part of, the β-sheet structure. The hypervariable regions in each chain are held together in close proximity by the FRM and, with the hypervariable regions from the other chain, contribute to the formation of the antigen-binding side (see Kabat et al., loc. cit.).

[0141] The terms “CDR”, and its plural “CDRs”, refer to the complementarity determining region of which three make up the binding character of a light chain variable region (CDR-L1, CDR-L2 and CDR-L3) and three make up the binding character of a heavy chain variable region (CDR-H1, CDR-H2 and CDR-H3). CDRs contain most of the residues responsible for specific interactions of the antibody with the antigen and hence contribute to the functional activity of an antibody molecule: they are the main determinants of antigen specificity.

[0142] The exact definitional CDR boundaries and lengths are subject to different classification and numbering systems. CDRs may therefore be referred to by Kabat, Chothia, contact or any other boundary definitions, including the numbering system described herein. Despite differing boundaries, each of these systems has some degree of overlap in what constitutes the so called “hypervariable regions” within the variable sequences. CDR definitions according to these systems may therefore differ in length and boundary areas with respect to the adjacent framework region. See for example Kabat (an approach based on cross-species sequence variability), Chothia (an approach based on crystallographic studies of antigen-antibody complexes), and/or MacCallum (Kabat et al., loc. cit.; Chothia et al., J. MoI. Biol, 1987, 196: 901⁻⁹¹⁷; and MacCallum et al., J. MoI. Biol, 1996, 262: 732). Still another standard for characterizing the antigen binding side is the AbM definition used by Oxford Molecular's AbM antibody modeling software. See, e.g., Protein Sequence and Structure Analysis of Antibody Variable Domains. In: Antibody Engineering Lab Manual (Ed.: Duebel, S. and Kontermann, R., Springer-Verlag, Heidelberg). To the extent that two residue identification techniques define regions of overlapping, but not identical regions, they can be combined to define a hybrid CDR. However, the numbering in accordance with the so-called Kabat system is preferred.

[0143] Typically, CDRs form a loop structure that can be classified as a canonical structure. The term “canonical structure” refers to the main chain conformation that is adopted by the antigen binding (CDR) loops. From comparative structural studies, it has been found that five of the six antigen binding loops have only a limited repertoire of available conformations. Each canonical structure can be characterized by the torsion angles of the polypeptide backbone. Correspondent loops between antibodies may, therefore, have very similar three dimensional structures, despite high amino acid sequence variability in most parts of the loops (Chothia and Lesk, J. MoI. Biol., 1987, 196: 901; Chothia et al., Nature, 1989, 342: 877; Martin and Thornton, J. MoI. Biol, 1996, 263: 800). Furthermore, there is a relationship between the adopted loop structure and the amino acid sequences surrounding it. The conformation of a particular canonical class is determined by the length of the loop and the amino acid residues residing at key positions within the loop, as well as within the conserved framework (i.e., outside of the loop). Assignment to a particular canonical class can therefore be made based on the presence of these key amino acid residues.

[0144] The term “canonical structure” may also include considerations as to the linear sequence of the antibody, for example, as catalogued by Kabat (Kabat et al., loc. cit.). The Kabat numbering scheme (system) is a widely adopted standard for numbering the amino acid residues of an antibody variable domain in a consistent manner and is the preferred scheme applied in the present invention as also mentioned elsewhere herein. Additional structural considerations can also be used to determine the canonical structure of an antibody. For example, those differences not fully reflected by Kabat numbering can be described by the numbering system of Chothia et al. and/or revealed by other techniques, for example, crystallography and two- or three-dimensional computational modeling. Accordingly, a given antibody sequence may be placed into a canonical class which allows for, among other things, identifying appropriate chassis sequences (e.g., based on a desire to include a variety of canonical structures in a library). Kabat numbering of antibody amino acid sequences and structural considerations as described by Chothia et al., loc. cit. and their implications for construing canonical aspects of antibody structure, are described in the literature. The subunit structures and three-dimensional configurations of different classes of immunoglobulins are well known in the art. For a review of the antibody structure, see Antibodies: A Laboratory Manual, Cold Spring Harbor Laboratory, eds. Harlow et al., 1988.

[0145] The CDR3 of the light chain and, particularly, the CDR3 of the heavy chain may constitute the most important determinants in antigen binding within the light and heavy chain variable regions. In some antigen-binding molecules, the heavy chain CDR3 appears to constitute the major area of contact between the antigen and the antibody. In vitro selection schemes in which CDR3 alone is varied can be used to vary the binding properties of an antibody or determine which residues contribute to the binding of an antigen. Hence, CDR3 is typically the greatest source of molecular diversity within the antibody-binding side. H3, for example, can be as short as two amino acid residues or greater than 26 amino acids.

[0146] In a classical full-length antibody or immunoglobulin, each light (L) chain is linked to a heavy (H) chain by one covalent disulfide bond, while the two H chains are linked to each other by one or more disulfide bonds depending on the H chain isotype. The CH domain most proximal to VH is usually designated as CH1. The constant (“C”) domains are not directly involved in antigen binding, but exhibit various effector functions, such as antibody-dependent, cell-mediated cytotoxicity and complement activation. The Fc region of an antibody is comprised within the heavy chain constant domains and is for example able to interact with cell surface located Fc receptors.

[0147] The sequence of antibody genes after assembly and somatic mutation is highly varied, and these varied genes are estimated to encode 10¹⁰ different antibody molecules (Immunoglobulin Genes, 2^{nd} ed., eds. Jonio et al., Academic Press, San Diego, CA, 1995). Accordingly, the immune system provides a repertoire of immunoglobulins. The term “repertoire” refers to at least one nucleotide sequence derived wholly or partially from at least one sequence encoding at least one immunoglobulin. The sequence(s) may be generated by rearrangement in vivo of the V, D, and J segments of heavy chains, and the V and J segments of light chains. Alternatively, the sequence(s) can be generated from a cell in response to which rearrangement occurs, e.g., in vitro stimulation. Alternatively, part or all of the sequence(s) may be obtained by DNA splicing, nucleotide synthesis, mutagenesis, and other methods, see, e.g., U.S. Pat. No. 5,565,332. A repertoire may include only one sequence or may include a plurality of sequences, including ones in a genetically diverse collection.

[0148] The term “Fc portion” or “Fc monomer” means in connection with this invention a polypeptide comprising at least one domain having the function of a CH2 domain and at least one domain having the function of a CH3 domain of an immunoglobulin molecule. As apparent from the term “Fc monomer”, the polypeptide comprising those CH domains is a “polypeptide monomer”. An Fc monomer can be a polypeptide comprising at least a fragment of the constant region of an immunoglobulin excluding the first constant region immunoglobulin domain of the heavy chain (CH1), but maintaining at least a functional part of one CH2 domain and a functional part of one CH3 domain, wherein the CH2 domain is amino terminal to the CH3 domain. In a preferred aspect of this definition, an Fc monomer can be a polypeptide constant region comprising a portion of the Ig-Fc hinge region, a CH2 region and a CH3 region, wherein the hinge region is amino terminal to the CH2 domain. It is envisaged that the hinge region of the present invention promotes dimerization. Such Fc polypeptide molecules can be obtained by papain digestion of an immunoglobulin region (of course resulting in a dimer of two Fc polypeptide), for example and not limitation. In another aspect of this definition, an Fc monomer can be a polypeptide region comprising a portion of a CH2 region and a CH3 region. Such Fc polypeptide molecules can be obtained by pepsin digestion of an immunoglobulin molecule, for example and not limitation. In one embodiment, the polypeptide sequence of an Fc monomer is substantially similar to an Fc polypeptide sequence of: an IgG₁ Fc region, an IgG₂ Fc region, an IgG₃ Fc region, an IgG₄ Fc region, an IgM Fc region, an IgA Fc region, an IgD Fc region and an IgE Fc region. (See, e.g., Padlan, Molecular Immunology, 31(3), 169-217 (1993)). Because there is some variation between immunoglobulins, and solely for clarity, Fc monomer refers to the last two heavy chain constant region immunoglobulin domains of IgA, IgD, and IgG, and the last three heavy chain constant region immunoglobulin domains of IgE and IgM. As mentioned, the Fc monomer can also include the flexible hinge N-terminal to these domains. For IgA and IgM, the Fc monomer may include the J chain. For IgG, the Fc portion comprises immunoglobulin domains CH2 and CH3 and the hinge between the first two domains and CH2. Although the boundaries of the Fc portion may vary an example for a human IgG heavy chain Fc portion comprising a functional hinge, CH2 and CH3 domain can be defined e.g. to comprise residues D231 (of the hinge domain—corresponding to D234 in Table 1 below) to P476, respectively L476 (for IgG₄) of the carboxyl-terminus of the CH3 domain, wherein the numbering is according to Kabat. The two Fc portion or Fc monomer, which are fused to each other via a peptide linker define the third domain of the antigen-binding molecule of the invention, which may also be defined as scFc domain.

[0149] In one embodiment of the invention it is envisaged that a scFc domain as disclosed herein, respectively the Fc monomers fused to each other are comprised only in the third domain of the antigen-binding molecule.

[0150] In line with the present invention an IgG hinge region can be identified by analogy using the Kabat numbering as set forth in Table 1. In line with the above, it is envisaged that for a hinge domain/region of the present invention the minimal requirement comprises the amino acid residues corresponding to the IgG1 sequence stretch of D231 D234 to P243 according to the Kabat numbering. It is likewise envisaged that a hinge domain/region of the present invention comprises or consists of the IgG1 hinge sequence DKTHTCPPCP (SEQ ID NO:) (corresponding to the stretch D234 to P243 as shown in Table 1 below—variations of said sequence are also envisaged provided that the hinge region still promotes dimerization). In a preferred embodiment of the invention the glycosylation site at Kabat position 314 of the CH2 domains in the third domain of the antigen-binding molecule is removed by a N314X substitution, wherein X is any amino acid excluding Q. Said substitution is preferably a N314G substitution. In a more preferred embodiment, said CH2 domain additionally comprises the following substitutions (position according to Kabat) V321C and R309C (these substitutions introduce the intra domain cysteine disulfide bridge at Kabat positions 309 and 321).

[0151] It is also envisaged that the third domain of the antigen-binding molecule of the invention comprises or consists in an amino to carboxyl order: DKTHTCPPCP (SEQ ID NO:) (i.e. hinge) —CH2-CH3-linker- DKTHTCPPCP (SEQ ID NO:) (i.e. hinge) —CH2-CH3. The peptide linker of the aforementioned antigen-binding molecule is in a preferred embodiment characterized by the amino acid sequence Gly-Gly-Gly-Gly-Ser, i.e. Gly4Ser (SEQ ID NO: 1), or polymers thereof, i.e. (Gly4Ser)x, where x is an integer of 5 or greater (e.g. 5, 6, 7, 8 etc. or greater), 6 being preferred ((Gly4Ser)6). Said construct may further comprise the aforementioned substitutions: N314X, preferably N314G, and/or the further substitutions V321C and R309C. In a preferred embodiment of the antigen-binding molecules of the invention as defined herein before, it is envisaged that the second domain binds to an extracellular epitope of the human and/or the Macaca CD3ε chain. Include Table 1: Kabat numbering of the amino acid residues of the hinge region

[0152] In further embodiments of the present invention, the hinge domain/region comprises or consists of the IgG2 subtype hinge sequence ERKCCVECPPCP (SEQ ID NO:), the IgG3 subtype hinge sequence ELKTPLDTTHTCPRCP (SEQ ID NO:) or ELKTPLGDTTHTCPRCP (SEQ ID NO:), and/or the IgG4 subtype hinge sequence ESKYGPPCPSCP (SEQ ID NO:). The IgG1 subtype hinge sequence may be the following one EPKSCDKTHTCPPCP (as shown in Table 1 and SEQ ID NO:). These core hinge regions are thus also envisaged in the context of the present invention.

[0153] The location and sequence of the IgG CH2 and IgG CD3 domain can be identified by analogy using the Kabat numbering as set forth in Table 2:

[0154] In one embodiment of the invention the emphasized bold amino acid residues in the CH3 domain of the first or both Fc monomers are deleted.

[0155] The peptide linker, by whom the polypeptide monomers (“Fc portion” or “Fc monomer”) of the third domain are fused to each other, preferably comprises at least 25 amino acid residues (25, 26, 27, 28, 29, 30 etc.). More preferably, this peptide linker comprises at least 30 amino acid residues (30, 31, 32, 33, 34, 35 etc.). It is also preferred that the linker comprises up to 40 amino acid residues, more preferably up to 35 amino acid residues, most preferably exactly 30 amino acid residues. A preferred embodiment of such peptide linker is characterized by the amino acid sequence Gly-Gly-Gly-Gly-Ser, i.e. Gly₄Ser (SEQ ID NO: 1), or polymers thereof, i.e. (Gly₄Ser)x, where x is an integer of 5 or greater (e.g. 6, 7 or 8). Preferably the integer is 6 or 7, more preferably the integer is 6.

[0156] In the event that a linker is used to fuse the first domain to the second domain, or the first or second domain to the third domain, this linker is preferably of a length and sequence sufficient to ensure that each of the first and second domains can, independently from one another, retain their differential binding specificities. For peptide linkers which connect the at least two binding domains (or two variable domains) in the antigen-binding molecule of the invention, those peptide linkers are preferred which comprise only a few number of amino acid residues, e.g. 12 amino acid residues or less. Thus, peptide linkers of 12, 11, 10, 9, 8, 7, 6 or 5 amino acid residues are preferred. An envisaged peptide linker with less than 5 amino acids comprises 4, 3, 2 or one amino acid(s), wherein Gly-rich linkers are preferred. A preferred embodiment of the peptide linker for a fusion the first and the second domain is depicted in SEQ ID NO:1. A preferred linker embodiment of the peptide linker for fusing the second and the third domain is a (Gly)₄-linker, also called G₄-linker.

[0157] A particularly preferred “single” amino acid in the context of one of the above described “peptide linker” is Gly. Accordingly, said peptide linker may consist of the single amino acid Gly. In a preferred embodiment of the invention a peptide linker is characterized by the amino acid sequence Gly-Gly-Gly-Gly-Ser, i.e. Gly₄Ser (SEQ ID NO: 1), or polymers thereof, i.e. (Gly₄Ser)x, where x is an integer of 1 or greater (e.g. 2 or 3). Preferred linkers are depicted in SEQ ID NOs: 1 to 12. The characteristics of said peptide linker, which comprise the absence of the promotion of secondary structures, are known in the art and are described e.g. in Dall'Acqua et al. (Biochem. (1998) 37, 9266-9273), Cheadle et al. (Mol Immunol (1992) 29, 21-30) and Raag and Whitlow (FASEB (1995) 9(1), 73-80). Peptide linkers which furthermore do not promote any secondary structures are preferred. The linkage of said domains to each other can be provided, e.g., by genetic engineering, as described in the examples. Methods for preparing fused and operatively linked bispecific single chain constructs and expressing them in mammalian cells or bacteria are well-known in the art (e.g. WO 99/54440 or Sambrook et al., Molecular Cloning: A Laboratory Manual, Cold Spring Harbor Laboratory Press, Cold Spring Harbor, New York, 2001).

[0158] In a preferred embodiment of the antigen-binding molecule or the present invention the first and second domain form an antigen-binding molecule in a format selected from the group consisting of (scFv), scFv-single domain mAb, diabody and oligomers of any of these formats.

[0159] According to a particularly preferred embodiment, and as documented in the appended examples, the first and the second domain of the antigen-binding molecule of the invention is a “bispecific single chain antigen-binding molecule”, more preferably a bispecific “single chain Fv” (scFv). Although the two domains of the Fv fragment, VL and VH, are coded for by separate genes, they can be joined, using recombinant methods, by a synthetic linker—as described hereinbefore—that enables them to be made as a single protein chain in which the VL and VH regions pair to form a monovalent molecule; see e.g., Huston et al. (1988) Proc. Natl. Acad. Sci USA 85:5879-5883). These antibody fragments are obtained using conventional techniques known to those with skill in the art, and the fragments are evaluated for function in the same manner as are whole or full-length antibodies. A single-chain variable fragment (scFv) is hence a fusion protein of the variable region of the heavy chain (VH) and of the light chain (VL) of immunoglobulins, usually connected with a short linker peptide as described herein. The linker is usually rich in glycine for flexibility, as well as serine or threonine for solubility, and can either connect the N-terminus of the VH with the C-terminus of the VL, or vice versa. This protein retains the specificity of the original immunoglobulin, despite removal of the constant regions and introduction of the linker.

[0160] Bispecific single chain antigen-binding molecules are known in the art and are described in WO 99/54440, Mack, J. Immunol. (1997), 158, 3965-3970, Mack, PNAS, (1995), 92, 7021-7025, Kufer, Cancer Immunol. Immunother., (1997), 45, 193-197, Loffler, Blood, (2000), 95, 6, 2098-2103, Brühl, Immunol., (2001), 166, 2420-2426, Kipriyanov, J. Mol. Biol., (1999), 293, 41-56. Techniques described for the production of single chain antibodies (see, inter alia, U.S. Pat. No. 4,946,778, Kontermann and D0bel (2010), loc. cit. and Little (2009), loc. cit.) can be adapted to produce single chain antigen-binding molecules specifically recognizing (an) elected target(s).

[0161] Bivalent (also called divalent) or bispecific single-chain variable fragments (bi-scFvs or di-scFvs having the format (scFv)₂ can be engineered by linking two scFv molecules (e.g. with linkers as described hereinbefore). If these two scFv molecules have the same binding specificity, the resulting (scFv)₂ molecule will preferably be called bivalent (i.e. it has two valences for the same target epitope). If the two scFv molecules have different binding specificities, the resulting (scFv)₂ molecule will preferably be called bispecific. The linking can be done by producing a single peptide chain with two VH regions and two VL regions, yielding tandem scFvs (see e.g. Kufer P. et al., (2004) Trends in Biotechnology 22(5):238-244). Another possibility is the creation of scFv molecules with linker peptides that are too short for the two variable regions to fold together (e.g. about five amino acids), forcing the scFvs to dimerize. This type is known as diabodies (see e.g. Hollinger, Philipp et al., (July 1993) Proceedings of the National Academy of Sciences of the United States of America 90 (14): 6444-8).

[0162] In line with this invention either the first, the second or the first and the second domain may comprise a single domain antibody, respectively the variable domain or at least the CDRs of a single domain antibody. Single domain antibodies comprise merely one (monomeric) antibody variable domain which is able to bind selectively to a specific antigen, independently of other V regions or domains. The first single domain antibodies were engineered from heavy chain antibodies found in camelids, and these are called V_{H}H fragments. Cartilaginous fishes also have heavy chain antibodies (IgNAR) from which single domain antibodies called V_{NAR} fragments can be obtained. An alternative approach is to split the dimeric variable domains from common immunoglobulins e.g. from humans or rodents into monomers, hence obtaining VH or VL as a single domain Ab. Although most research into single domain antibodies is currently based on heavy chain variable domains, nanobodies derived from light chains have also been shown to bind specifically to target epitopes. Examples of single domain antibodies are called sdAb, nanobodies or single variable domain antibodies.

[0163] A (single domain mAb)₂ is hence a monoclonal antigen-binding molecule composed of (at least) two single domain monoclonal antibodies, which are individually selected from the group comprising V_{H}, V_{L}, V_{H}H and V_{NAR}. The linker is preferably in the form of a peptide linker. Similarly, an “scFv-single domain mAb” is a monoclonal antigen-binding molecule composed of at least one single domain antibody as described above and one scFv molecule as described above. Again, the linker is preferably in the form of a peptide linker.

[0164] Whether or not an antigen-binding molecule competes for binding with another given antigen-binding molecule can be measured in a competition assay such as a competitive ELISA or a cell-based competition assay. Avidin-coupled microparticles (beads) can also be used. Similar to an avidin-coated ELISA plate, when reacted with a biotinylated protein, each of these beads can be used as a substrate on which an assay can be performed. Antigen is coated onto a bead and then precoated with the first antibody. The second antibody is added and any additional binding is determined. Possible means for the read-out includes flow cytometry.

[0165] T cells or T lymphocytes are a type of lymphocyte (itself a type of white blood cell) that play a central role in cell-mediated immunity. There are several subsets of T cells, each with a distinct function. T cells can be distinguished from other lymphocytes, such as B cells and NK cells, by the presence of a T cell receptor (TCR) on the cell surface. The TCR is responsible for recognizing antigens bound to major histocompatibility complex (MHC) molecules and is composed of two different protein chains. In 95% of the T cells, the TCR consists of an alpha (a) and beta (D) chain. When the TCR engages with antigenic peptide and MHC (peptide/MHC complex), the T lymphocyte is activated through a series of biochemical events mediated by associated enzymes, co-receptors, specialized adaptor molecules, and activated or released transcription factors.

[0166] The CD3 receptor complex is a protein complex and is composed of four chains. In mammals, the complex contains a CD3γ (gamma) chain, a CD3δ (delta) chain, and two CD3ε (epsilon) chains. These chains associate with the T cell receptor (TCR) and the so-called ζ (zeta) chain to form the T cell receptor CD3 complex and to generate an activation signal in T lymphocytes. The CD3γ (gamma), CD3δ (delta), and CD3ε (epsilon) chains are highly related cell-surface proteins of the immunoglobulin superfamily containing a single extracellular immunoglobulin domain. The intracellular tails of the CD3 molecules contain a single conserved motif known as an immunoreceptor tyrosine-based activation motif or ITAM for short, which is essential for the signaling capacity of the TCR. The CD3 epsilon molecule is a polypeptide which in humans is encoded by the CD3E gene which resides on chromosome 11. The most preferred epitope of CD3 epsilon is comprised within amino acid residues 1-27 of the human CD3 epsilon extracellular domain. It is envisaged that antigen-binding molecules according to the present invention typically and advantageously show less unspecific T cell activation, which is not desired in specific immunotherapy. This translates to a reduced risk of side effects.

[0167] The redirected lysis of target cells via the recruitment of T cells by a multispecific, at least bispecific, antigen-binding molecule involves cytolytic synapse formation and delivery of perforin and granzymes. The engaged T cells are capable of serial target cell lysis, and are not affected by immune escape mechanisms interfering with peptide antigen processing and presentation, or clonal T cell differentiation; see, for example, WO 2007/042261.

[0168] Cytotoxicity mediated by antigen-binding molecules of the invention can be measured in various ways. Effector cells can be e.g. stimulated enriched (human) CD8 positive T cells or unstimulated (human) peripheral blood mononuclear cells (PBMC). If the target cells are of macaque origin or express or are transfected with macaque, CD20 or CD22, which is bound by the first domain, the effector cells should also be of macaque origin such as a macaque T cell line, e.g. 4119LnPx. The target cells should express (at least the extracellular domain of) CD20 or CD22, e.g. human or macaque CD20 or CD22. Target cells can be a cell line (such as CHO) which is stably or transiently transfected with CD20, or CD22, e.g. human or macaque, CD20 or CD22. Usually EC₅₀ values are expected to be lower with target cell lines expressing higher levels of, CD20 or CD22, on the cell surface. The effector to target cell (E:T) ratio is usually about 10:1, but can also vary. Cytotoxic activity of CD20 or CD22, bispecific antigen-binding molecules can be measured in a ⁵¹Cr-release assay (incubation time of about 18 hours) or in a in a FACS-based cytotoxicity assay (incubation time of about 48 hours). Modifications of the assay incubation time (cytotoxic reaction) are also possible. Other methods of measuring cytotoxicity are well-known to the skilled person and comprise MTT or MTS assays, ATP-based assays including bioluminescent assays, the sulforhodamine B (SRB) assay, WST assay, clonogenic assay and the ECIS technology.

[0169] The cytotoxic activity mediated by CD20 and CD22xCD3 bispecific antigen-binding molecules of the present invention is preferably measured in a cell-based cytotoxicity assay. It may also be measured in a ⁵¹Cr-release assay. It is represented by the EC₅₀ value, which corresponds to the half maximal effective concentration (concentration of the antigen-binding molecule which induces a cytotoxic response halfway between the baseline and maximum). Preferably, the EC₅₀ value of the CD20 and CD22xCD3bispecific antigen-binding molecules is ≤5000 pM or ≤4000 pM, more preferably ≤3000 pM or ≤2000 pM, even more preferably ≤1000 pM or ≤500 pM, even more preferably ≤400 pM or ≤300 pM, even more preferably ≤200 pM, even more preferably ≤100 pM, even more preferably ≤50 pM, even more preferably ≤20 pM or ≤10 pM, and most preferably ≤5 pM.

[0170] The above given EC₅₀ values can be measured in different assays. The skilled person is aware that an EC₅₀ value can be expected to be lower when stimulated/enriched CD8⁺ T cells are used as effector cells, compared with unstimulated PBMC. It can furthermore be expected that the EC₅₀ values are lower when the target cells express a high number of, CD20 or CD22, compared with a low target expression rat. For example, when stimulated/enriched human CD8⁺ T cells are used as effector cells (and either CD20 or CD22, transfected cells such as CHO cells or CD20 or CD22, positive human cell lines are used as target cells), the EC₅₀ value of the CD20 or CD22 bispecific antigen-binding molecule is preferably ≤1000 pM, more preferably ≤500 pM, even more preferably ≤250 pM, even more preferably ≤100 pM, even more preferably ≤50 pM, even more preferably ≤10 pM, and most preferably ≤5 pM. When human PBMCs are used as effector cells, the EC₅₀ value of the CD20 and CD22, xCD3 bispecific antigen-binding molecule is preferably ≤5000 pM or ≤4000 pM (in particular when the target cells are CD20 or CD22 positive human cell lines), more preferably ≤2000 pM, more preferably ≤1000 pM or ≤500 pM, even more preferably ≤200 pM, even more preferably ≤150 pM, even more preferably ≤100 pM, and most preferably ≤50 pM, or lower. When a macaque T cell line such as LnPx4119 is used as effector cells, and a macaque CD20 or CD22 transfected cell line such as CHO cells is used as target cell line, the EC₅₀ value of the CD20 and CD22, xCD3 bispecific antigen-binding molecule is preferably ≤2000 pM or ≤1500 pM, more preferably ≤1000 pM or ≤500 pM, even more preferably ≤300 pM or ≤250 pM, even more preferably ≤100 pM, and most preferably ≤50 pM.

[0171] Preferably, the CD20 and CD22xCD3bispecific antigen-binding molecules of the present invention do not induce/mediate lysis or do not essentially induce/mediate lysis of CD20 and CD22 negative cells such as CHO cells. The term “do not induce lysis”, “do not essentially induce lysis”, “do not mediate lysis” or “do not essentially mediate lysis” means that an antigen-binding molecule of the present invention does not induce or mediate lysis of more than 30%, preferably not more than 20%, more preferably not more than 10%, particularly preferably not more than 9%, 8%, 7%, 6% or 5% of CD20 or CD22 negative cells, whereby lysis of a CD20 or CD22, positive human cell line is set to be 100%. This usually applies for concentrations of the antigen-binding molecule of up to 500 nM. The skilled person knows how to measure cell lysis without further ado. Moreover, the present specification teaches specific instructions how to measure cell lysis.

[0172] The difference in cytotoxic activity between the monomeric and the dimeric isoform of individual CD20 and CD22xCD3bispecific antigen-binding molecules is referred to as “potency gap”. This potency gap can e.g. be calculated as ratio between EC₅₀ values of the molecule's monomeric and dimeric form. Potency gaps of the CD20 and CD22xCD3bispecific antigen-binding molecules of the present invention are preferably ≤5, more preferably ≤4, even more preferably ≤3, even more preferably ≤2 and most preferably ≤1.

[0173] The first and/or the second (or any further) binding domain(s) of the antigen-binding molecule of the invention is/are preferably cross-species specific for members of the mammalian order of primates. Cross-species specific CD3 binding domains are, for example, described in WO 2008/119567. According to one embodiment, the first and/or second binding domain, in addition to binding to human CD20 and CD22 and human CD3, respectively, will also bind to CD20 and CD22/CD3 of primates including (but not limited to) new world primates (such as Callithrix jacchus, Saguinus Oedipus or Saimiri sciureus), old world primates (such baboons and macaques), gibbons, and non-human homininae.

[0174] In one embodiment of the antigen-binding molecule of the invention the first domain binds to human CD20 and CD22 and further binds to macaque CD20 and CD22, such as CD20 and CD22 of Macaca fascicularis, and more preferably, to macaque CD20 and CD22 expressed on the surface of cells, e.g. such as CHO or 293 cells. The affinity of the first domain for CD20 and CD22, preferably for human CD20 and CD22, is preferably ≤100 nM or ≤50 nM, more preferably ≤25 nM or ≤20 nM, more preferably ≤15 nM or ≤10 nM, even more preferably ≤5 nM, even more preferably ≤2.5 nM or ≤2 nM, even more preferably ≤1 nM, even more preferably ≤0.6 nM, even more preferably ≤0.5 nM, and most preferably ≤0.4 nM. The affinity can be measured for example in a BIAcore assay or in a Scatchard assay. Other methods of determining the affinity are also well-known to the skilled person. The affinity of the first domain for macaque CD20 and CD22 is preferably ≤15 nM, more preferably ≤10 nM, even more preferably ≤5 nM, even more preferably ≤1 nM, even more preferably ≤0.5 nM, even more preferably ≤0.1 nM, and most preferably ≤0.05 nM or even ≤0.01 nM.

[0175] Preferably the affinity gap of the antigen-binding molecules according to the invention for binding macaque CD20 and CD22 versus human CD20 and CD22 [ma CD20 and CD22: hu CD20 and CD22] (as determined e.g. by BiaCore or by Scatchard analysis) is <100, preferably <20, more preferably <15, further preferably <10, even more preferably <8, more preferably <6 and most preferably <2. Preferred ranges for the affinity gap of the antigen-binding molecules according to the invention for binding macaque CD20 and CD22 versus human CD20 and CD22 are between 0.1 and 20, more preferably between 0.2 and 10, even more preferably between 0.3 and 6, even more preferably between 0.5 and 3 or between 0.5 and 2.5, and most preferably between 0.5 and 2 or between 0.6 and 2.

[0176] The third binding domain of the antigen-binding molecule of the invention binds to human CD3 epsilon and/or to Macaca CD3 epsilon. In a preferred embodiment the second domain further binds to Callithrix jacchus, Saguinus Oedipus or Saimiri sciureus CD3 epsilon. Callithrix jacchus and Saguinus oedipus are both new world primate belonging to the family of Callitrichidae, while Saimiri sciureus is a new world primate belonging to the family of Cebidae. Said binding domain may preferably be referred to in Table 5 as “I2C” or “I2C0”.

[0177] It is preferred for the antigen-binding molecule of the present invention that the third binding domain which binds to an extracellular epitope of the human and/or the Macaca CD3 epsilon chain comprises a VL region comprising CDR-L1, CDR-L2 and CDR-L3 selected from:
[0178] (a) SEQ ID NO: 392 to 394; and
[0179] (b) SEQ ID NO: 395 to 397.

[0180] In a furthermore preferred embodiment of the antigen-binding molecule of the present invention, the third domain which binds to an extracellular epitope of the human and/or the Macaca CD3 epsilon chain comprises a VH region comprising CDR-H 1, CDR-H2 and CDR-H3 selected from:
[0181] (a) SEQ ID NO: 400 to 402; and
[0182] (b) SEQ ID NO: 403 to 405. In a preferred embodiment of the antigen-binding molecule of the invention the above described three groups of VL CDRs are combined with the above described ten groups of VH CDRs within the third binding domain to form groups, each comprising CDR-L 1-3 and CDR-H 1-3.

[0183] It is preferred for the antigen-binding molecule of the present invention that the third domain which binds to CD3 comprises a VL region selected from the group consisting of those depicted in SEQ ID NOs: 17, 21, 35, 39, 53, 57, 71, 75, 89, 93, 107, 111, 125, 129, 143, 147, 161, 165, 179 or 183 of WO 2008/119567 or as depicted in SEQ ID NO: 13 according to the present invention.

[0184] It is also preferred that the third domain which binds to CD3 comprises a VH region selected from the group consisting of those depicted in SEQ ID NO: 15, 19, 33, 37, 51, 55, 69, 73, 87, 91, 105, 109, 123, 127, 141, 145, 159, 163, 177 or 181 of WO 2008/119567 or as depicted in SEQ ID NO: 14.

[0185] More preferably, the antigen-binding molecule of the present invention is characterized by a third domain which binds to CD3 comprising a VL region and a VH region selected from the group consisting of:
[0186] (a) a VL region as depicted in SEQ ID NO: 17 or 21 of WO 2008/119567 and a VH region as depicted in SEQ ID NO: 15 or 19 of WO 2008/119567;
[0187] (b) a VL region as depicted in SEQ ID NO: 35 or 39 of WO 2008/119567 and a VH region as depicted in SEQ ID NO: 33 or 37 of WO 2008/119567;
[0188] (c) a VL region as depicted in SEQ ID NO: 53 or 57 of WO 2008/119567 and a VH region as depicted in SEQ ID NO: 51 or 55 of WO 2008/119567;
[0189] (d) a VL region as depicted in SEQ ID NO: 71 or 75 of WO 2008/119567 and a VH region as depicted in SEQ ID NO: 69 or 73 of WO 2008/119567;
[0190] (e) a VL region as depicted in SEQ ID NO: 89 or 93 of WO 2008/119567 and a VH region as depicted in SEQ ID NO: 87 or 91 of WO 2008/119567;
[0191] (f) a VL region as depicted in SEQ ID NO: 107 or 111 of WO 2008/119567 and a VH region as depicted in SEQ ID NO: 105 or 109 of WO 2008/119567;
[0192] (g) a VL region as depicted in SEQ ID NO: 125 or 129 of WO 2008/119567 and a VH region as depicted in SEQ ID NO: 123 or 127 of WO 2008/119567;
[0193] (h) a VL region as depicted in SEQ ID NO: 143 or 147 of WO 2008/119567 and a VH region as depicted in SEQ ID NO: 141 or 145 of WO 2008/119567;
[0194] (i) a VL region as depicted in SEQ ID NO: 161 or 165 of WO 2008/119567 and a VH region as depicted in SEQ ID NO: 159 or 163 of WO 2008/119567; and
[0195] (j) a VL region as depicted in SEQ ID NO: 179 or 183 of WO 2008/119567 and a VH region as depicted in SEQ ID NO: 177 or 181 of WO 2008/119567.

[0196] Also preferred in connection with the antigen-binding molecule of the present invention is a third domain which binds to CD3 comprising a VL region as depicted in SEQ ID NO: 13 and a VH region as depicted in SEQ ID NO: 14.

[0197] According to a preferred embodiment of the antigen-binding molecule of the present invention, the first and/or the third domain have the following format: The pairs of VH regions and VL regions are in the format of a single chain antibody (scFv). The VH and VL regions are arranged in the order VH-VL or VL-VH. It is preferred that the VH-region is positioned N-terminally of a linker sequence, and the VL-region is positioned C-terminally of the linker sequence.

[0198] A preferred embodiment of the above described antigen-binding molecule of the present invention is characterized by the third domain which binds to CD3 comprising an amino acid sequence selected from the group consisting of SEQ ID NOs: 23, 25, 41, 43, 59, 61, 77, 79, 95, 97, 113, 115, 131, 133, 149, 151, 167, 169, 185 or 187 of WO 2008/119567 or as depicted in SEQ ID NO: 15.

[0199] The invention further provides an antigen-binding molecule comprising or having an amino acid sequence (full bispecific antigen-binding molecule) selected from the group consisting of any of 673, 676, 679, 682, 685, 688, 691, 694, 697, 700, 703, 706, 709, 712, 715, 718, 721, 724, 727, 730, 733, 736, 739, 742, 745, 748, 751, 754, 757, 760, 763, 766, 769, 772, 775, 778, 781, 784, 787, 790, 793, 796, 799, 802, 805, 808, 811, 814, 817, 820, 823, 826, 829, 832, 835, 838, 841, 844, 847, 850, 853, 856, 859, 862, 865, 868, 871, 1437, 1440, 1443, 1446, 1449, 1452, 1455, 1458, 1461, 1464, 1467, 1470, 1473, 1476, 1479, 1482, 1485, 1488, 1499, 1667, 1670, 1673, 1676, 1679, 1682, 1685, 1688, 1691, 1694, 1697, 1700, 1703, 1706, 1709, 1712, 1715, 1718, 1721, 1724, 1727, 1730, 1733, 1736, 1739, 1742, 1745, 1748, 1751, 1754, 1757, 1760, 1763, 1766, 1769, 1772, 1775, 1778, 1781, 1784, 1787, 1790, 1793, 1796, 1799, 1802, 1805, 1808, 1811, 1814, 1817, 1820, 1823, 1826, 1829, 1838, 1851, 1864, 1877, 1890, 1903, 1916, 1933, 1946, 1959, 1972, 1985, 1998, 2011, 2024, 2037, 2050, 2063, 2076, 2089, 2102, 2115, 2128, 2141, 2154, 2167, 2180, 2194, 2206, 2219, 2232, 2245, 2258, 2262, 2270, 2271, 2280, 2281, 2290, 2291, 2300, 2301, 2310, 2311, 2320, 2321, 2330, 2331, 2340, 2341, 2350, 2351, 2360, 2361, 2370, 2371, 2380, 2381, 2390, 2391, 2400, 2401, 2410, 2411, 2420, 2421, 2430, 2431, 2440, 2441, 2450, 2451, 2460, 2461, 2470, 2471, 2480, 2481, 2490, 2491, 2500, 2501, 2510, 2511, 2520, 2521, 2530, 2531, 2540, 2541, 2550, 2551, 2560, 2561, 2570, 2571, 2580, 2581, 2590, 2591, 2600, 2601, 2610, 2611, 2620, 2621, 2630, 2631, 2640, 2641, 2650, 2651, 2660, 2661, 2670, 2671, 2680, 2681, 2690, 2691, 2700, 2701, 2710, 2711, 2720, 2721, 2730, 2731, 2740, 2741, 2750, 2751, 2760, 2761, 2770, 2771, 2780, 2781, 2790, 2791, 2800, 2801, 2810, 2811, 2820, 2821, 2830, 2831, 2840, 2841, 2850, 2851, 2860, 2861, 2870, 2871, 2880, 2881, 2890, 2891, 2900, 2901, 2910, 2911, 2920, 2921, 2930, 2931, 2940, 2941, 2950, 2951, 2960, 2961, 2970, 2971, 2980, 2981, 2990, 2991, 3000, 3001, 3010, 3011, 3020, 3021, 3030, 3031, 3040, 3041, 3050, 3051, 3060, 3061, 3070, 3071, 3080, 3081, 3090, 3091, 3100, 3101, 3110, 3111, 3120, 3121, 3130, 3131, 3140, 3141, 3150, 3151, 3160, 3161, 3170, 3171, 3180, 3181, 3190, 3191, 3200, 3201, 3210, 3211, 3220, 3221, 3231, 3240, 3241, 3250, 3251, 3260, 3261, 3270, 3271, 3280, 3281, 3290, 3291, 3300, 3301, 3310, 3311, 3320, 3321, 3330, 3331, 3340, 3341, 3344, 3345, 3356, 3367, 3378, 3389, 3400, 3411, 3422, 3433, 3444, 3455, 3466, 3477, 3488, 3499, 3510, 3521, 3532, 3543, 3554, 3565, 3576, 3579, 382, 3585, 3588, 3591, 3594, 3597, 3600, 3603, 3606, 3609, 3612, 3615, 3618, 3621, 3624, 3627, 3630, 3633, 3636, 3639, 3642, 3645, 3648, 3651, 3654, 3657, 3660, 3663, 3666, 3669, 3672, 3675, 3678, 3689, 3700, 3704, 3705, 3708, 3709, 3710, 3711, 3722, 3733, 3736, 3739, 3744, 3747, 3748, 3756, 3757, 3761, and 3762, preferably 1437, or having an amino acid sequence having at least 90, 91, 92, 93, 94 95, 96, 97, 98 or 99% identity to said sequences.

[0200] Covalent modifications of the antigen-binding molecules are also included within the scope of this invention, and are generally, but not always, done post-translationally. For example, several types of covalent modifications of the antigen-binding molecule are introduced into the molecule by reacting specific amino acid residues of the antigen-binding molecule with an organic derivatizing agent that is capable of reacting with selected side chains or the N- or C-terminal residues.

[0201] Cysteinyl residues most commonly are reacted with α-haloacetates (and corresponding amines), such as chloroacetic acid or chloroacetamide, to give carboxymethyl or carboxyamidomethyl derivatives. Cysteinyl residues also are derivatized by reaction with bromotrifluoroacetone, α-bromo-β-(5-imidozoyl)propionic acid, chloroacetyl phosphate, N-alkylmaleimides, 3-nitro-2-pyridyl disulfide, methyl 2-pyridyl disulfide, p-chloromercuribenzoate, 2-chloromercuri-4-nitrophenol, or chloro-7-nitrobenzo-2-oxa-1,3-diazole.

[0202] Histidyl residues are derivatized by reaction with diethylpyrocarbonate at pH 5.5-7.0 because this agent is relatively specific for the histidyl side chain. Para-bromophenacyl bromide also is useful; the reaction is preferably performed in 0.1 M sodium cacodylate at pH 6.0. Lysinyl and amino terminal residues are reacted with succinic or other carboxylic acid anhydrides. Derivatization with these agents has the effect of reversing the charge of the lysinyl residues. Other suitable reagents for derivatizing alpha-amino-containing residues include imidoesters such as methyl picolinimidate; pyridoxal phosphate; pyridoxal; chloroborohydride; trinitrobenzenesulfonic acid; O-methylisourea; 2,4-pentanedione; and transaminase-catalyzed reaction with glyoxylate.

[0203] Arginyl residues are modified by reaction with one or several conventional reagents, among them phenylglyoxal, 2,3-butanedione, 1,2-cyclohexanedione, and ninhydrin. Derivatization of arginine residues requires that the reaction be performed in alkaline conditions because of the high pKa of the guanidine functional group. Furthermore, these reagents may react with the groups of lysine as well as the arginine epsilon-amino group.

[0204] The specific modification of tyrosyl residues may be made, with particular interest in introducing spectral labels into tyrosyl residues by reaction with aromatic diazonium compounds or tetranitromethane. Most commonly, N-acetylimidizole and tetranitromethane are used to form 0-acetyl tyrosyl species and 3-nitro derivatives, respectively. Tyrosyl residues are iodinated using ¹²⁵I or ¹³¹I to prepare labeled proteins for use in radioimmunoassay, the chloramine T method described above being suitable.

[0205] Carboxyl side groups (aspartyl or glutamyl) are selectively modified by reaction with carbodiimides (R′—N═C═N—R′), where R and R′ are optionally different alkyl groups, such as 1-cyclohexyl-3-(2-morpholinyl-4-ethyl) carbodiimide or 1-ethyl-3-(4-azonia-4,4-dimethylpentyl) carbodiimide. Furthermore, aspartyl and glutamyl residues are converted to asparaginyl and glutaminyl residues by reaction with ammonium ions.

[0206] Derivatization with bifunctional agents is useful for crosslinking the antigen-binding molecules of the present invention to a water-insoluble support matrix or surface for use in a variety of methods. Commonly used crosslinking agents include, e.g., 1,1-bis(diazoacetyl)-2-phenylethane, glutaraldehyde, N-hydroxysuccinimide esters, for example, esters with 4-azidosalicylic acid, homobifunctional imidoesters, including disuccinimidyl esters such as 3,3′-dithiobis(succinimidylpropionate), and bifunctional maleimides such as bis-N-maleimido-1,8-octane. Derivatizing agents such as methyl-3-[(p-azidophenyl)dithio]propioimidate yield photoactivatable intermediates that are capable of forming crosslinks in the presence of light. Alternatively, reactive water-insoluble matrices such as cyanogen bromide-activated carbohydrates and the reactive substrates as described in U.S. Pat. Nos. 3,969,287; 3,691,016; 4,195,128; 4,247,642; 4,229,537; and 4,330,440 are employed for protein immobilization.

[0207] Glutaminyl and asparaginyl residues are frequently deamidated to the corresponding glutamyl and aspartyl residues, respectively. Alternatively, these residues are deamidated under mildly acidic conditions. Either form of these residues falls within the scope of this invention.

[0208] Other modifications include hydroxylation of proline and lysine, phosphorylation of hydroxyl groups of seryl or threonyl residues, methylation of the α-amino groups of lysine, arginine, and histidine side chains (T. E. Creighton, Proteins: Structure and Molecular Properties, W. H. Freeman & Co., San Francisco, 1983, pp. 79-86), acetylation of the N-terminal amine, and amidation of any C-terminal carboxyl group.

[0209] Another type of covalent modification of the antigen-binding molecules included within the scope of this invention comprises altering the glycosylation pattern of the protein. As is known in the art, glycosylation patterns can depend on both the sequence of the protein (e.g., the presence or absence of particular glycosylation amino acid residues, discussed below), or the host cell or organism in which the protein is produced. Particular expression systems are discussed below.

[0210] Glycosylation of polypeptides is typically either N-linked or O-linked. N-linked refers to the attachment of the carbohydrate moiety to the side chain of an asparagine residue. The tri-peptide sequences asparagine-X-serine and asparagine-X-threonine, where X is any amino acid except proline, are the recognition sequences for enzymatic attachment of the carbohydrate moiety to the asparagine side chain. Thus, the presence of either of these tri-peptide sequences in a polypeptide creates a potential glycosylation site. O-linked glycosylation refers to the attachment of one of the sugars N-acetylgalactosamine, galactose, or xylose, to a hydroxyamino acid, most commonly serine or threonine, although 5-hydroxyproline or 5-hydroxylysine may also be used.

[0211] Addition of glycosylation sites to the antigen-binding molecule is conveniently accomplished by altering the amino acid sequence such that it contains one or more of the above-described tri-peptide sequences (for N-linked glycosylation sites). The alteration may also be made by the addition of, or substitution by, one or more serine or threonine residues to the starting sequence (for O-linked glycosylation sites). For ease, the amino acid sequence of an antigen-binding molecule is preferably altered through changes at the DNA level, particularly by mutating the DNA encoding the polypeptide at preselected bases such that codons are generated that will translate into the desired amino acids.

[0212] Another means of increasing the number of carbohydrate moieties on the antigen-binding molecule is by chemical or enzymatic coupling of glycosides to the protein. These procedures are advantageous in that they do not require production of the protein in a host cell that has glycosylation capabilities for N- and O-linked glycosylation. Depending on the coupling mode used, the sugar(s) may be attached to (a) arginine and histidine, (b) free carboxyl groups, (c) free sulfhydryl groups such as those of cysteine, (d) free hydroxyl groups such as those of serine, threonine, or hydroxyproline, (e) aromatic residues such as those of phenylalanine, tyrosine, or tryptophan, or (f) the amide group of glutamine. These methods are described in WO 87/05330, and in Aplin and Wriston, 1981, CRC Crit. Rev. Biochem., pp. 259-306.

[0213] Removal of carbohydrate moieties present on the starting antigen-binding molecule may be accomplished chemically or enzymatically. Chemical deglycosylation requires exposure of the protein to the compound trifluoromethanesulfonic acid, or an equivalent compound. This treatment results in the cleavage of most or all sugars except the linking sugar (N-acetylglucosamine or N-acetylgalactosamine), while leaving the polypeptide intact. Chemical deglycosylation is described by Hakimuddin et al., 1987, Arch. Biochem. Biophys. 259:52 and by Edge et al., 1981, Anal. Biochem. 118:131. Enzymatic cleavage of carbohydrate moieties on polypeptides can be achieved by the use of a variety of endo- and exo-glycosidases as described by Thotakura et al., 1987, Meth. Enzymol. 138:350. Glycosylation at potential glycosylation sites may be prevented by the use of the compound tunicamycin as described by Duskin et al., 1982, J. Biol. Chem. 257:3105. Tunicamycin blocks the formation of protein-N-glycoside linkages.

[0214] Other modifications of the antigen-binding molecule are also contemplated herein. For example, another type of covalent modification of the antigen-binding molecule comprises linking the antigen-binding molecule to various non-proteinaceous polymers, including, but not limited to, various polyols such as polyethylene glycol, polypropylene glycol, polyoxyalkylenes, or copolymers of polyethylene glycol and polypropylene glycol, in the manner set forth in U.S. Pat. Nos. 4,640,835; 4,496,689; 4,301,144; 4,670,417; 4,791,192 or 4,179,337. In addition, as is known in the art, amino acid substitutions may be made in various positions within the antigen-binding molecule, e.g. in order to facilitate the addition of polymers such as PEG.

[0215] In some embodiments, the covalent modification of the antigen-binding molecules of the invention comprises the addition of one or more labels. The labelling group may be coupled to the antigen-binding molecule via spacer arms of various lengths to reduce potential steric hindrance. Various methods for labelling proteins are known in the art and can be used in performing the present invention. The term “label” or “labelling group” refers to any detectable label. In general, labels fall into a variety of classes, depending on the assay in which they are to be detected—the following examples include, but are not limited to:
[0216] a) isotopic labels, which may be radioactive or heavy isotopes, such as radioisotopes or radionuclides (e.g., ³H, ¹⁴C, ¹⁵N, ³⁵S, ⁸⁹Zr, ⁹⁰Y, ⁹⁹Tc, ¹¹¹In, ¹²⁵I, ¹³¹I)
[0217] b) magnetic labels (e.g., magnetic particles)
[0218] c) redox active moieties
[0219] d) optical dyes (including, but not limited to, chromophores, phosphors and fluorophores) such as fluorescent groups (e.g., FITC, rhodamine, lanthanide phosphors), chemiluminescent groups, and fluorophores which can be either “small molecule” fluors or proteinaceous fluors
[0220] e) enzymatic groups (e.g. horseradish peroxidase, β-galactosidase, luciferase, alkaline phosphatase)
[0221] f) biotinylated groups
[0222] g) predetermined polypeptide epitopes recognized by a secondary reporter (e.g., leucine zipper pair sequences, binding sides for secondary antibodies, metal binding domains, epitope tags, etc.)

[0223] By “fluorescent label” is meant any molecule that may be detected via its inherent fluorescent properties. Suitable fluorescent labels include, but are not limited to, fluorescein, rhodamine, tetramethylrhodamine, eosin, erythrosin, coumarin, methyl-coumarins, pyrene, Malacite green, stilbene, Lucifer Yellow, Cascade BlueJ, Texas Red, IAEDANS, EDANS, BODIPY FL, LC Red 640, Cy 5, Cy 5.5, LC Red 705, Oregon green, the Alexa-Fluor dyes (Alexa Fluor 350, Alexa Fluor 430, Alexa Fluor 488, Alexa Fluor 546, Alexa Fluor 568, Alexa Fluor 594, Alexa Fluor 633, Alexa Fluor 660, Alexa Fluor 680), Cascade Blue, Cascade Yellow and R-phycoerythrin (PE) (Molecular Probes, Eugene, OR), FITC, Rhodamine, and Texas Red (Pierce, Rockford, IL), Cy5, Cy5.5, Cy7 (Amersham Life Science, Pittsburgh, PA). Suitable optical dyes, including fluorophores, are described in Molecular Probes Handbook by Richard P. Haugland.

[0224] Suitable proteinaceous fluorescent labels also include, but are not limited to, green fluorescent protein, including a Renilla, Ptilosarcus, or Aequorea species of GFP (Chalfie et al., 1994, Science 263:802-805), EGFP (Clontech Laboratories, Inc., Genbank Accession Number U55762), blue fluorescent protein (BFP, Quantum Biotechnologies, Inc. 1801 de Maisonneuve Blvd. West, 8th Floor, Montreal, Quebec, Canada H3H 1J9; Stauber, 1998, Biotechniques 24:462-471; Heim et al., 1996, Curr. Biol. 6:178-182), enhanced yellow fluorescent protein (EYFP, Clontech Laboratories, Inc.), luciferase (Ichiki et al., 1993, J. Immunol. 150:5408-5417), β galactosidase (Nolan et al., 1988, Proc. Natl. Acad. Sci. U.S.A. 85:2603-2607) and Renilla (WO92/15673, WO95/07463, WO98/14605, WO98/26277, WO99/49019, U.S. Pat. Nos. 5,292,658; 5,418,155; 5,683,888; 5,741,668; 5,777,079; 5,804,387; 5,874,304; 5,876,995; 5,925,558).

[0225] The antigen-binding molecule of the invention may also comprise additional domains, which are e.g. helpful in the isolation of the molecule or relate to an adapted pharmacokinetic profile of the molecule. Domains helpful for the isolation of an antigen-binding molecule may be selected from peptide motives or secondarily introduced moieties, which can be captured in an isolation method, e.g. an isolation column. Non-limiting embodiments of such additional domains comprise peptide motives known as Myc-tag, HAT-tag, HA-tag, TAP-tag, GST-tag, chitin binding domain (CBD-tag), maltose binding protein (MBP-tag), Flag-tag, Strep-tag and variants thereof (e.g. StrepII-tag) and His-tag. All herein disclosed antigen-binding molecules may comprise a His-tag domain, which is generally known as a repeat of consecutive His residues in the amino acid sequence of a molecule, preferably of five, and more preferably of six His residues (hexa-histidine). The His-tag may be located e.g. at the N- or C-terminus of the antigen-binding molecule, preferably it is located at the C-terminus. Most preferably, a hexa-histidine tag (HHHHHH) (SEQ ID NO:16) is linked via peptide bond to the C-terminus of the antigen-binding molecule according to the invention. Additionally, a conjugate system of PLGA-PEG-PLGA may be combined with a poly-histidine tag for sustained release application and improved pharmacokinetic profile.

[0226] Amino acid sequence modifications of the antigen-binding molecules described herein are also contemplated. For example, it may be desirable to improve the binding affinity and/or other biological properties of the antigen-binding molecule. Amino acid sequence variants of the antigen-binding molecules are prepared by introducing appropriate nucleotide changes into the antigen-binding molecules nucleic acid, or by peptide synthesis. All of the below described amino acidacid sequence modifications should result in an antigen-binding molecule which still retains the desired biological activity (binding to CD20 and CD22 and to CD3) of the unmodified parental molecule.

[0227] The term “amino acid” or “amino acid residue” typically refers to an amino acid having its art recognized definition such as an amino acid selected from the group consisting of: alanine (Ala or A); arginine (Arg or R); asparagine (Asn or N); aspartic acid (Asp or D); cysteine (Cys or C); glutamine (GIn or Q); glutamic acid (GIu or E); glycine (GIy or G); histidine (His or H); isoleucine (He or I): leucine (Leu or L); lysine (Lys or K); methionine (Met or M); phenylalanine (Phe or F); pro line (Pro or P); serine (Ser or S); threonine (Thr or T); tryptophan (Trp or W); tyrosine (Tyr or Y); and valine (Val or V), although modified, synthetic, or rare amino acids may be used as desired. Generally, amino acids can be grouped as having a nonpolar side chain (e.g., Ala, Cys, He, Leu, Met, Phe, Pro, Val); a negatively charged side chain (e.g., Asp, GIu); a positively charged sidechain (e.g., Arg, His, Lys); or an uncharged polar side chain (e.g., Asn, Cys, GIn, GIy, His, Met, Phe, Ser, Thr, Trp, and Tyr).

[0228] Amino acid modifications include, for example, deletions from, and/or insertions into, and/or substitutions of, residues within the amino acid sequences of the antigen-binding molecules. Any combination of deletion, insertion, and substitution is made to arrive at the final construct, provided that the final construct possesses the desired characteristics. The amino acid changes also may alter post-translational processes of the antigen-binding molecules, such as changing the number or position of glycosylation sites.

[0229] For example, 1, 2, 3, 4, 5, or 6 amino acids may be inserted, substituted or deleted in each of the CDRs (of course, dependent on their length), while 1, 2, 3, 4, 5, 6, 7, 8, 9, 10, 11, 12, 13, 14, 15, 16, 17, 18, 19, 20, or 25 amino acids may be inserted, substituted or deleted in each of the FRs. Preferably, amino acid sequence insertions into the antigen-binding molecule include amino- and/or carboxyl-terminal fusions ranging in length from 1, 2, 3, 4, 5, 6, 7, 8, 9 or 10 residues to polypeptides containing a hundred or more residues, as well as intra-sequence insertions of single or multiple amino acid residues. Corresponding modifications may also performed within the third domain of the antigen-binding molecule of the invention. An insertional variant of the antigen-binding molecule of the invention includes the fusion to the N-terminus or to the C-terminus of the antigen-binding molecule of an enzyme or the fusion to a polypeptide.

[0230] The sites of greatest interest for substitutional mutagenesis include (but are not limited to) the CDRs of the heavy and/or light chain, in particular the hypervariable regions, but FR alterations in the heavy and/or light chain are also contemplated. The substitutions are preferably conservative substitutions as described herein. Preferably, 1, 2, 3, 4, 5, 6, 7, 8, 9, or 10 amino acids may be substituted in a CDR, while 1, 2, 3, 4, 5, 6, 7, 8, 9, 10, 11, 12, 13, 14, 15, 16, 17, 18, 19, 20, or 25 amino acids may be substituted in the framework regions (FRs), depending on the length of the CDR or FR. For example, if a CDR sequence encompasses 6 amino acids, it is envisaged that one, two or three of these amino acids are substituted. Similarly, if a CDR sequence encompasses 15 amino acids it is envisaged that one, two, three, four, five or six of these amino acids are substituted.

[0231] A useful method for identification of certain residues or regions of the antigen-binding molecules that are preferred locations for mutagenesis is called “alanine scanning mutagenesis” as described by Cunningham and Wells in Science, 244: 1081-1085 (1989). Here, a residue or group of target residues within the antigen-binding molecule is/are identified (e.g. charged residues such as arg, asp, his, lys, and glu) and replaced by a neutral or negatively charged amino acid (most preferably alanine or polyalanine) to affect the interaction of the amino acids with the epitope.

[0232] Those amino acid locations demonstrating functional sensitivity to the substitutions are then refined by introducing further or other variants at, or for, the sites of substitution. Thus, while the site or region for introducing an amino acid sequence variation is predetermined, the nature of the mutation per se needs not to be predetermined. For example, to analyze or optimize the performance of a mutation at a given site, alanine scanning or random mutagenesis may be conducted at a target codon or region, and the expressed antigen-binding molecule variants are screened for the optimal combination of desired activity. Techniques for making substitution mutations at predetermined sites in the DNA having a known sequence are well known, for example, M13 primer mutagenesis and PCR mutagenesis. Screening of the mutants is done using assays of antigen binding activities, such as CD20 and CD22 or CD3 binding.

[0233] Generally, if amino acids are substituted in one or more or all of the CDRs of the heavy and/or light chain, it is preferred that the then-obtained “substituted” sequence is at least 60% or 65%, more preferably 70% or 75%, even more preferably 80% or 85%, and particularly preferably 90% or 95% identical to the “original” CDR sequence. This means that it is dependent of the length of the CDR to which degree it is identical to the “substituted” sequence. For example, a CDR having 5 amino acids is preferably 80% identical to its substituted sequence in order to have at least one amino acid substituted. Accordingly, the CDRs of the antigen-binding molecule may have different degrees of identity to their substituted sequences, e.g., CDRL1 may have 80%, while CDRL3 may have 90%.

[0234] Preferred substitutions (or replacements) are conservative substitutions. However, any substitution (including non-conservative substitution or one or more from the “exemplary substitutions” listed in Table 3, below) is envisaged as long as the antigen-binding molecule retains its capability to bind to CD20 and CD22 via the first domain and to CD3 epsilon via the second domain and/or its CDRs have an identity to the then substituted sequence (at least 60% or 65%, more preferably 70% or 75%, even more preferably 80% or 85%, and particularly preferably 90% or 95% identical to the “original” CDR sequence).

[0235] Conservative substitutions are shown in Table 3 under the heading of “preferred substitutions”. If such substitutions result in a change in biological activity, then more substantial changes, denominated “exemplary substitutions” in Table 3, or as further described below in reference to amino acid classes, may be introduced and the products screened for a desired characteristic.

TABLE 3
Amino acid substitutions

| | | Preferred |
|---|---|---|
| Original | Exemplary Substitutions | Substitutions |
| Ala (A) | val, leu, ile | Val |
| Arg (R) | lys, gln, asn | Lys |
| Asn (N) | gln, his, asp, lys, arg | Gln |
| Asp (D) | glu, asn | Glu |
| Cys (C) | ser, ala | ser |
| Gln (Q) | asn, glu | asn |
| Glu (E) | asp, gln | asp |
| Gly (G) | Ala | ala |
| His (H) | asn, gln, lys, arg | arg |
| Ile (I) | leu, val, met, ala, phe | leu |
| Leu (L) | norleucine, ile, val, met, ala | ile |
| Lys (K) | arg, gln, asn | arg |
| Met (M) | leu, phe, ile | leu |
| Phe (F) | leu, val, ile, ala, tyr | tyr |
| Pro (P) | Ala | ala |
| Ser (S) | Thr | thr |
| Thr (T) | Ser | ser |
| Trp (W) | tyr, phe | tyr |
| Tyr (Y) | trp, phe, thr, ser | phe |
| Val (V) | ile, leu, met, phe, ala | leu |

[0236] Substantial modifications in the biological properties of the antigen-binding molecule of the present invention are accomplished by selecting substitutions that differ significantly in their effect on maintaining (a) the structure of the polypeptide backbone in the area of the substitution, for example, as a sheet or helical conformation, (b) the charge or hydrophobicity of the molecule at the target site, or (c) the bulk of the side chain. Naturally occurring residues are divided into groups based on common side-chain properties: (1) hydrophobic: norleucine, met, ala, val, leu, ile; (2) neutral hydrophilic: cys, ser, thr; asn, gln (3) acidic: asp, glu; (4) basic: his, lys, arg; (5) residues that influence chain orientation: gly, pro; and (6) aromatic: trp, tyr, phe.

[0237] Non-conservative substitutions will entail exchanging a member of one of these classes for another class. Any cysteine residue not involved in maintaining the proper conformation of the antigen-binding molecule may be substituted, generally with serine, to improve the oxidative stability of the molecule and prevent aberrant crosslinking. Conversely, cysteine bond(s) may be added to the antibody to improve its stability (particularly where the antibody is an antibody fragment such as an Fv fragment).

[0238] For amino acid sequences, sequence identity and/or similarity is determined by using standard techniques known in the art, including, but not limited to, the local sequence identity algorithm of Smith and Waterman, 1981, Adv. Appl. Math. 2:482, the sequence identity alignment algorithm of Needleman and Wunsch, 1970, J. Mol. Biol. 48:443, the search for similarity method of Pearson and Lipman, 1988, Proc. Nat. Acad. Sci. U.S.A. 85:2444, computerized implementations of these algorithms (GAP, BESTFIT, FASTA, and TFASTA in the Wisconsin Genetics Software Package, Genetics Computer Group, 575 Science Drive, Madison, Wis.), the Best Fit sequence program described by Devereux et al., 1984, Nucl. Acid Res. 12:387-395, preferably using the default settings, or by inspection. Preferably, percent identity is calculated by FastDB based upon the following parameters: mismatch penalty of 1; gap penalty of 1; gap size penalty of 0.33; and joining penalty of 30, “Current Methods in Sequence Comparison and Analysis,” Macromolecule Sequencing and Synthesis, Selected Methods and Applications, pp 127-149 (1988), Alan R. Liss, Inc.

[0239] An example of a useful algorithm is PILEUP. PILEUP creates a multiple sequence alignment from a group of related sequences using progressive, pairwise alignments. It can also plot a tree showing the clustering relationships used to create the alignment. PILEUP uses a simplification of the progressive alignment method of Feng & Doolittle, 1987, J. Mol. Evol. 35:351-360; the method is similar to that described by Higgins and Sharp, 1989, CABIOS 5:151-153. Useful PILEUP parameters including a default gap weight of 3.00, a default gap length weight of 0.10, and weighted end gaps.

[0240] Another example of a useful algorithm is the BLAST algorithm, described in: Altschul et al., 1990, J Mol. Biol. 215:403-410; Altschul et al., 1997, Nucleic Acids Res. 25:3389-3402; and Karin et al., 1993, Proc. Natl. Acad. Sci. U.S.A. 90:5873-5787. A particularly useful BLAST program is the WU-BLAST-2 program which was obtained from Altschul et al., 1996, Methods in Enzymology 266:460-480. WU-BLAST-2 uses several search parameters, most of which are set to the default values. The adjustable parameters are set with the following values: overlap span=1, overlap fraction=0.125, word threshold (T)=II. The HSP S and HSP S2 parameters are dynamic values and are established by the program itself depending upon the composition of the particular sequence and composition of the particular database against which the sequence of interest is being searched; however, the values may be adjusted to increase sensitivity.

[0241] An additional useful algorithm is gapped BLAST as reported by Altschul et al., 1993, Nucl. Acids Res. 25:3389-3402. Gapped BLAST uses BLOSUM-62 substitution scores; threshold T parameter set to 9; the two-hit method to trigger ungapped extensions, charges gap lengths of k a cost of 10+k; Xu set to 16, and Xg set to 40 for database search stage and to 67 for the output stage of the algorithms. Gapped alignments are triggered by a score corresponding to about 22 bits.

[0242] Generally, the amino acid homology, similarity, or identity between individual variant CDRs or VH/VL sequences are at least 60% to the sequences depicted herein, and more typically with preferably increasing homologies or identities of at least 65% or 70%, more preferably at least 75% or 80%, even more preferably at least 85%, 90%, 91%, 92%, 93%, 94%, 95%, 96%, 97%, 98%, 99%, and almost 100%. In a similar manner, “percent (%) nucleic acid sequence identity” with respect to the nucleic acid sequence of the binding proteins identified herein is defined as the percentage of nucleotide residues in a candidate sequence that are identical with the nucleotide residues in the coding sequence of the antigen-binding molecule. A specific method utilizes the BLASTN module of WU-BLAST-2 set to the default parameters, with overlap span and overlap fraction set to 1 and 0.125, respectively.

[0243] Generally, the nucleic acid sequence homology, similarity, or identity between the nucleotide sequences encoding individual variant CDRs or VH/VL sequences and the nucleotide sequences depicted herein are at least 60%, and more typically with preferably increasing homologies or identities of at least 65%, 70%, 75%, 80%, 81%, 82%, 83%, 84%, 85%, 86%, 87%, 88%, 89%, 90%, 91%, 92%, 93%, 94%, 95%, 96%, 97%, 98%, or 99%, and almost 100%. Thus, a “variant CDR” or a “variant VH/VL region” is one with the specified homology, similarity, or identity to the parent CDR/VH/VL of the invention, and shares biological function, including, but not limited to, at least 60%, 65%, 70%, 75%, 80%, 81%, 82%, 83%, 84%, 85%, 86%, 87%, 88%, 89%, 90%, 91%, 92%, 93%, 94%, 95%, 96%, 97%, 98%, or 99% of the specificity and/or activity of the parent CDR or VH/VL.

[0244] In one embodiment, the percentage of identity to human germline of the antigen-binding molecules according to the invention is ≥70% or ≥75%, more preferably ≥80% or ≥85%, even more preferably ≥90%, and most preferably ≥91%, ≥92%, ≥93%, ≥94%, ≥95% or even ≥96%. Identity to human antibody germline gene products is thought to be an important feature to reduce the risk of therapeutic proteins to elicit an immune response against the drug in the patient during treatment. Hwang & Foote (“Immunogenicity of engineered antibodies”; Methods 36 (2005) 3-10) demonstrate that the reduction of non-human portions of drug antigen-binding molecules leads to a decrease of risk to induce anti-drug antibodies in the patients during treatment. By comparing an exhaustive number of clinically evaluated antibody drugs and the respective immunogenicity data, the trend is shown that humanization of the V-regions of antibodies makes the protein less immunogenic (average 5.1% of patients) than antibodies carrying unaltered non-human V regions (average 23.59% of patients). A higher degree of identity to human sequences is hence desirable for V-region based protein therapeutics in the form of antigen-binding molecules. For this purpose of determining the germline identity, the V-regions of VL can be aligned with the amino acid sequences of human germline V segments and J segments (http://vbase.mrc-cpe.cam.ac.uk/) using Vector NTI software and the amino acid sequence calculated by dividing the identical amino acid residues by the total number of amino acid residues of the VL in percent. The same can be for the VH segments (http://vbase.mrc-cpe.cam.ac.uk/) with the exception that the VH CDR3 may be excluded due to its high diversity and a lack of existing human germline VH CDR3 alignment partners. Recombinant techniques can then be used to increase sequence identity to human antibody germline genes.

[0245] In a further embodiment, the bispecific antigen-binding molecules of the present invention exhibit high monomer yields under standard research scale conditions, e.g., in a standard two-step purification process. Preferably the monomer yield of the antigen-binding molecules according to the invention is ≥0.25 mg/L supernatant, more preferably ≥0.5 mg/L, even more preferably ≥1 mg/L, and most preferably ≥3 mg/L supernatant.

[0246] Likewise, the yield of the dimeric antigen-binding molecule isoforms and hence the monomer percentage (i.e., monomer: (monomer+dimer)) of the antigen-binding molecules can be determined. The productivity of monomeric and dimeric antigen-binding molecules and the calculated monomer percentage can e.g. be obtained in the SEC purification step of culture supernatant from standardized research-scale production in roller bottles. In one embodiment, the monomer percentage of the antigen-binding molecules is ≥80%, more preferably ≥85%, even more preferably ≥90%, and most preferably ≥95%.

[0247] In one embodiment, the antigen-binding molecules have a preferred plasma stability (ratio of EC50 with plasma to EC50 w/o plasma) of ≤5 or ≤4, more preferably ≤3.5 or ≤3, even more preferably ≤2.5 or ≤2, and most preferably ≤1.5 or ≤1. The plasma stability of an antigen-binding molecule can be tested by incubation of the construct in human plasma at 37° C. for 24 hours followed by EC50 determination in a ⁵¹chromium release cytotoxicity assay. The effector cells in the cytotoxicity assay can be stimulated enriched human CD8 positive T cells. Target cells can e.g. be CHO cells transfected with human CD20 and CD22. The effector to target cell (E:T) ratio can be chosen as 10:1 or 5:1. The human plasma pool used for this purpose is derived from the blood of healthy donors collected by EDTA coated syringes. Cellular components are removed by centrifugation and the upper plasma phase is collected and subsequently pooled. As control, antigen-binding molecules are diluted immediately prior to the cytotoxicity assay in RPMI-1640 medium. The plasma stability is calculated as ratio of EC50 (after plasma incubation) to EC50 (control).

[0248] It is furthermore preferred that the monomer to dimer conversion of antigen-binding molecules of the invention is low. The conversion can be measured under different conditions and analyzed by high performance size exclusion chromatography. For example, incubation of the monomeric isoforms of the antigen-binding molecules can be carried out for 7 days at 37° C. and concentrations of e.g. 100 μg/ml or 250 μg/ml in an incubator. Under these conditions, it is preferred that the antigen-binding molecules of the invention show a dimer percentage that is ≤5%, more preferably ≤4%, even more preferably ≤3%, even more preferably ≤2.5%, even more preferably ≤2%, even more preferably ≤1.5%, and most preferably ≤1% or ≤0.5% or even 0%.

[0249] It is also preferred that the bispecific antigen-binding molecules of the present invention present with very low dimer conversion after a number of freeze/thaw cycles. For example, the antigen-binding molecule monomer is adjusted to a concentration of 250 μg/ml e.g. in generic formulation buffer and subjected to three freeze/thaw cycles (freezing at −80° C. for 30 min followed by thawing for 30 min at room temperature), followed by high performance SEC to determine the percentage of initially monomeric antigen-binding molecule, which had been converted into dimeric antigen-binding molecule. Preferably the dimer percentages of the bispecific antigen-binding molecules are ≤5%, more preferably ≤4%, even more preferably ≤3%, even more preferably ≤2.5%, even more preferably ≤2%, even more preferably ≤1.5%, and most preferably ≤1% or even ≤0.5%, for example after three freeze/thaw cycles.

[0250] The bispecific antigen-binding molecules of the present invention preferably show a favorable thermostability with aggregation temperatures ≥45° C. or ≥50° C., more preferably ≥52° C. or ≥54° C., even more preferably ≥56° C. or ≥57° C., and most preferably ≥58° C. or ≥59° C. The thermostability parameter can be determined in terms of antibody aggregation temperature as follows: Antibody solution at a concentration 250 μg/ml is transferred into a single use cuvette and placed in a Dynamic Light Scattering (DLS) device. The sample is heated from 40° C. to 70° C. at a heating rate of 0.5° C./min with constant acquisition of the measured radius. Increase of radius indicating melting of the protein and aggregation is used to calculate the aggregation temperature of the antibody.

[0251] Alternatively, temperature melting curves can be determined by Differential Scanning Calorimetry (DSC) to determine intrinsic biophysical protein stabilities of the antigen-binding molecules. These experiments are performed using a MicroCal LLC (Northampton, MA, U.S.A) VP-DSC device. The energy uptake of a sample containing an antigen-binding molecule is recorded from 20° C. to 90° C. compared to a sample containing only the formulation buffer. The antigen-binding molecules are adjusted to a final concentration of 250 μg/ml e.g. in SEC running buffer. For recording of the respective melting curve, the overall sample temperature is increased stepwise. At each temperature T energy uptake of the sample and the formulation buffer reference is recorded. The difference in energy uptake Cp (kcal/mole/° C.) of the sample minus the reference is plotted against the respective temperature. The melting temperature is defined as the temperature at the first maximum of energy uptake.

[0252] The CD20 and CD22xCD3bispecific antigen-binding molecules of the invention are also envisaged to have a turbidity (as measured by OD340 after concentration of purified monomeric antigen-binding molecule to 2.5 mg/ml and overnight incubation) of ≤0.2, preferably of 0.15, more preferably of ≤0.12, even more preferably of ≤0.1, and most preferably of ≤0.08.

[0253] In a further embodiment the antigen-binding molecule according to the invention is stable at physiologic or slightly lower pH, i.e. about pH 7.4 to 6.0. The more tolerant the antigen-binding molecule behaves at unphysiologic pH such as about pH 6.0, the higher is the recovery of the antigen-binding molecule eluted from an ion exchange column relative to the total amount of loaded protein. Recovery of the antigen-binding molecule from an ion (e.g., cation) exchange column at about pH 6.0 is preferably ≥30%, more preferably ≥40%, more preferably ≥50%, even more preferably ≥60%, even more preferably ≥70%, even more preferably ≥80%, even more preferably ≥90%, even more preferably ≥95%, and most preferably ≥99%.

[0254] It is furthermore envisaged that the bispecific antigen-binding molecules of the present invention exhibit therapeutic efficacy or anti-tumor activity. This can e.g. be assessed in a study as disclosed in the following generalized example of an advanced stage human tumor xenograft model:

[0255] On day 1 of the study, 5×10⁶ cells of a human target cell antigen (here: CD20 and CD22) positive cancer cell line are subcutaneously injected in the right dorsal flank of female NOD/SCID mice. When the mean tumor volume reaches about 100 mm³, in vitro expanded human CD3 positive T cells are transplanted into the mice by injection of about 2×10⁷ cells into the peritoneal cavity of the animals. Mice of vehicle control group 1 do not receive effector cells and are used as an untransplanted control for comparison with vehicle control group 2 (receiving effector cells) to monitor the impact of T cells alone on tumor growth. The antibody treatment starts when the mean tumor volume reaches about 200 mm³. The mean tumor size of each treatment group on the day of treatment start should not be statistically different from any other group (analysis of variance). Mice are treated with 0.5 mg/kg/day of a CD20 and CD22xCD3bispecific antigen-binding molecule by intravenous bolus injection for about 15 to 20 days. Tumors are measured by caliper during the study and progress evaluated by intergroup comparison of tumor volumes (TV). The tumor growth inhibition T/C [%] is determined by calculating TV as T/C %=100×(median TV of analyzed group)/(median TV of control group 2).

[0256] The skilled person knows how to modify or adapt certain parameters of this study, such as the number of injected tumor cells, the site of injection, the number of transplanted human T cells, the amount of bispecific antigen-binding molecules to be administered, and the timelines, while still arriving at a meaningful and reproducible result. Preferably, the tumor growth inhibition T/C [%] is ≤70 or ≤60, more preferably ≤50 or ≤40, even more preferably ≤30 or ≤20 and most preferably ≤10 or ≤5 or even ≤2.5. Tumor growth inhibition is preferably close to 100%.

[0257] In a preferred embodiment of the antigen-binding molecule of the invention the antigen-binding molecule is a single chain antigen-binding molecule.

[0258] Also in a preferred embodiment of the antigen-binding molecule of the invention said third domain comprises in an amino to carboxyl order:
[0259] hinge-CH2-CH3-linker-hinge-CH2-CH3.

[0260] In one embodiment of the invention each of said polypeptide monomers of the third domain has an amino acid sequence that is at least 90% identical to a sequence selected from the group consisting of: SEQ ID NO: 17-24. In a preferred embodiment or the invention each of said polypeptide monomers has an amino acid sequence selected from SEQ ID NO: 17-24.

[0261] Also in one embodiment of the invention the CH2 domain of one or preferably each (both) polypeptide monomers of the third domain comprises an intra domain cysteine disulfide bridge. As known in the art the term “cysteine disulfide bridge” refers to a functional group with the general structure R—S—S—R. The linkage is also called an SS-bond or a disulfide bridge and is derived by the coupling of two thiol groups of cysteine residues. It is particularly preferred for the antigen-binding molecule of the invention that the cysteines forming the cysteine disulfide bridge in the mature antigen-binding molecule are introduced into the amino acid sequence of the CH2 domain corresponding to 309 and 321 (Kabat numbering).

[0262] In one embodiment of the invention a glycosylation site in Kabat position 314 of the CH2 domain is removed. It is preferred that this removal of the glycosylation site is achieved by a N314X substitution, wherein X is any amino acid excluding Q. Said substitution is preferably a N314G. In a more preferred embodiment, said CH2 domain additionally comprises the following substitutions (position according to Kabat) V321C and R309C (these substitutions introduce the intra domain cysteine disulfide bridge at Kabat positions 309 and 321).

[0263] It is assumed that the preferred features of the antigen-binding molecule of the invention compared e.g. to the bispecific heteroFc antigen-binding molecule known in the art (FigureF 1b) may be inter alia related to the introduction of the above described modifications in the CH2 domain. Thus, it is preferred for the construct of the invention that the CH2 domains in the third domain of the antigen-binding molecule of the invention comprise the intra domain cysteine disulfide bridge at Kabat positions 309 and 321 and/or the glycosylation site at Kabat position 314 is removed, preferably by a N314G substitution.

[0264] In a further preferred embodiment of the invention the CH2 domains in the third domain of the antigen-binding molecule of the invention comprise the intra domain cysteine disulfide bridge at Kabat positions 309 and 321 and the glycosylation site at Kabat position 314 is removed by a N314G substitution. Most preferably, the polypeptide monomer of the third domain of the antigen-binding molecule of the invention has an amino acid sequence selected from the group consisting of SEQ ID NO: 17 and 18.

[0265] In one embodiment the invention provides an antigen-binding molecule, wherein:
[0266] (i) the first domain comprises two antibody variable domains and the second domain comprises two antibody variable domains;
[0267] (ii) the first domain comprises one antibody variable domain and the second domain comprises two antibody variable domains;
[0268] (iii) the first domain comprises two antibody variable domains and the second domain comprises one antibody variable domain; or
[0269] (iv) the first domain comprises one antibody variable domain and the second domain comprises one antibody variable domain.

[0270] Accordingly, the first and the second domain may be binding domains comprising each two antibody variable domains such as a VH and a VL domain. Examples for such binding domains comprising two antibody variable domains where described herein above and comprise e.g. Fv fragments, scFv fragments or Fab fragments described herein above. Alternatively either one or both of those binding domains may comprise only a single variable domain. Examples for such single domain binding domains where described herein above and comprise e.g. nanobodies or single variable domain antibodies comprising merely one variable domain, which may be VHH, VH or VL, that specifically bind an antigen or epitope independently of other V regions or domains.

[0271] In a preferred embodiment of the antigen-binding molecule of the invention first and second domain are fused to the third domain via a peptide linker. Preferred peptide linker have been described herein above and are characterized by the amino acid sequence Gly-Gly-Gly-Gly-Ser, i.e. Gly₄Ser (SEQ ID NO: 1), or polymers thereof, i.e. (Gly₄Ser)x, where x is an integer of 1 or greater (e.g. 2 or 3). A particularly preferred linker for the fusion of the first and second domain to the third domain is depicted in SEQ ID NO: 1.

[0272] In a preferred embodiment the antigen-binding molecule of the invention is characterized to comprise in an amino to carboxyl order:
[0273] (a) the first domain;
[0274] (b) a peptide linker having an amino acid sequence selected from the group consisting of SEQ ID NO: 1-3;
[0275] (c) the second domain;
[0276] (d) a peptide linker having an amino acid sequence selected from the group consisting of SEQ ID NO: 1, 2, 3, 9, 10, 11 and 12;
[0277] (e) the first polypeptide monomer of the third domain;
[0278] (f) a peptide linker having an amino acid sequence selected from the group consisting of SEQ ID NO: 5, 6, 7 and 8; and
[0279] (g) the second polypeptide monomer of the third domain.

[0280] The antigen-binding molecule of the present invention comprises a first domain which binds to CD20 and CD22, preferably to the extracellular domain(s) (ECD) of CD20 and CD22. It is understood that the term “binding to the extracellular domain of CD20 and CD22”, in the context of the present invention, implies that the binding domain binds to CD20 and CD22 expressed on the surface of a target cell. The first domain according to the invention hence preferably binds to CD20 and CD22 when it is expressed by naturally expressing cells or cell lines, and/or by cells or cell lines transformed or (stably/transiently) transfected with CD20 and CD22. In a preferred embodiment the first binding domain also binds to CD20 and CD22 when CD20 and CD22 is used as a “target” or “ligand” molecule in an in vitro binding assay such as BIAcore or Scatchard. The “target cell” can be any prokaryotic or eukaryotic cell expressing CD20 and CD22 on its surface; preferably the target cell is a cell that is part of the human or animal body, such as a specific CD20 and CD22 expressing cancer or tumor cell.

[0281] Preferably, the first binding domain binds to human CD20 and CD22/CD20 and CD22 ECD. In a further preferred embodiment, it binds to macaque CD20 and CD22/CD20 and CD22 ECD. According to the most preferred embodiment, it binds to both the human and the macaque CD20 and CD22/CD20 and CD22 ECD. The “CD20 and CD22 extracellular domain” or “CD20 and CD22 ECD” refers to the CD20 and CD22 region or sequence which is essentially free of transmembrane and cytoplasmic domains of CD20 and CD22. It will be understood by the skilled artisan that the transmembrane domain identified for the CD20 and CD22 polypeptide of the present invention is identified pursuant to criteria routinely employed in the art for identifying that type of hydrophobic domain. The exact boundaries of a transmembrane domain may vary but most likely by no more than about 5 amino acids at either end of the domain specifically mentioned herein.

[0282] Preferred binding domains which bind to CD3 are disclosed in WO 2010/037836, and WO 2011/121110. Any binding domain for CD3 described in these applications may be used in the context of the present invention, however, preferred are third binding domains having a SEQ ID NOs of 400 or 409 as disclosed herein. SEQ ID NO 409 is very preferred.

[0283] The invention further provides a polynucleotide/nucleic acid molecule encoding an antigen-binding molecule of the invention. A polynucleotide is a biopolymer composed of 13 or more nucleotide monomers covalently bonded in a chain. DNA (such as cDNA) and RNA (such as mRNA) are examples of polynucleotides with distinct biological function. Nucleotides are organic molecules that serve as the monomers or subunits of nucleic acid molecules like DNA or RNA. The nucleic acid molecule or polynucleotide can be double stranded and single stranded, linear and circular. It is preferably comprised in a vector which is preferably comprised in a host cell. Said host cell is, e.g. after transformation or transfection with the vector or the polynucleotide of the invention, capable of expressing the antigen-binding molecule. For that purpose the polynucleotide or nucleic acid molecule is operatively linked with control sequences.

[0284] The genetic code is the set of rules by which information encoded within genetic material (nucleic acids) is translated into proteins. Biological decoding in living cells is accomplished by the ribosome which links amino acids in an order specified by mRNA, using tRNA molecules to carry amino acids and to read the mRNA three nucleotides at a time. The code defines how sequences of these nucleotide triplets, called codons, specify which amino acid will be added next during protein synthesis. With some exceptions, a three-nucleotide codon in a nucleic acid sequence specifies a single amino acid. Because the vast majority of genes are encoded with exactly the same code, this particular code is often referred to as the canonical or standard genetic code. While the genetic code determines the protein sequence for a given coding region, other genomic regions can influence when and where these proteins are produced.

[0285] Furthermore, the invention provides a vector comprising a polynucleotide/nucleic acid molecule of the invention. A vector is a nucleic acid molecule used as a vehicle to transfer (foreign) genetic material into a cell. The term “vector” encompasses—but is not restricted to—plasmids, viruses, cosmids and artificial chromosomes. In general, engineered vectors comprise an origin of replication, a multicloning site and a selectable marker. The vector itself is generally a nucleotide sequence, commonly a DNA sequence that comprises an insert (transgene) and a larger sequence that serves as the “backbone” of the vector. Modern vectors may encompass additional features besides the transgene insert and a backbone: promoter, genetic marker, antibiotic resistance, reporter gene, targeting sequence, protein purification tag. Vectors called expression vectors (expression constructs) specifically are for the expression of the transgene in the target cell, and generally have control sequences.

[0286] The term “control sequences” refers to DNA sequences necessary for the expression of an operably linked coding sequence in a particular host organism. The control sequences that are suitable for prokaryotes, for example, include a promoter, optionally an operator sequence, and a ribosome binding side. Eukaryotic cells are known to utilize promoters, polyadenylation signals, and enhancers.

[0287] A nucleic acid is “operably linked” when it is placed into a functional relationship with another nucleic acid sequence. For example, DNA for a presequence or secretory leader is operably linked to DNA for a polypeptide if it is expressed as a preprotein that participates in the secretion of the polypeptide; a promoter or enhancer is operably linked to a coding sequence if it affects the transcription of the sequence; or a ribosome binding side is operably linked to a coding sequence if it is positioned so as to facilitate translation. Generally, “operably linked” means that the DNA sequences being linked are contiguous, and, in the case of a secretory leader, contiguous and in reading phase. However, enhancers do not have to be contiguous. Linking is accomplished by ligation at convenient restriction sites. If such sites do not exist, the synthetic oligonucleotide adaptors or linkers are used in accordance with conventional practice.

[0288] “Transfection” is the process of deliberately introducing nucleic acid molecules or polynucleotides (including vectors) into target cells. The term is mostly used for non-viral methods in eukaryotic cells. Transduction is often used to describe virus-mediated transfer of nucleic acid molecules or polynucleotides. Transfection of animal cells typically involves opening transient pores or “holes” in the cell membrane, to allow the uptake of material. Transfection can be carried out using calcium phosphate, by electroporation, by cell squeezing or by mixing a cationic lipid with the material to produce liposomes, which fuse with the cell membrane and deposit their cargo inside.

[0289] The term “transformation” is used to describe non-viral transfer of nucleic acid molecules or polynucleotides (including vectors) into bacteria, and also into non-animal eukaryotic cells, including plant cells. Transformation is hence the genetic alteration of a bacterial or non-animal eukaryotic cell resulting from the direct uptake through the cell membrane(s) from its surroundings and subsequent incorporation of exogenous genetic material (nucleic acid molecules). Transformation can be effected by artificial means. For transformation to happen, cells or bacteria must be in a state of competence, which may occur as a time-limited response to environmental conditions such as starvation and cell density.

[0290] Moreover, the invention provides a host cell transformed or transfected with the polynucleotide/nucleic acid molecule or with the vector of the invention. As used herein, the terms “host cell” or “recipient cell” are intended to include any individual cell or cell culture that can be or has/have been recipients of vectors, exogenous nucleic acid molecules, and polynucleotides encoding the antigen-binding molecule of the present invention; and/or recipients of the antigen-binding molecule itself. The introduction of the respective material into the cell is carried out by way of transformation, transfection and the like. The term “host cell” is also intended to include progeny or potential progeny of a single cell. Because certain modifications may occur in succeeding generations due to either natural, accidental, or deliberate mutation or due to environmental influences, such progeny may not, in fact, be completely identical (in morphology or in genomic or total DNA complement) to the parent cell, but is still included within the scope of the term as used herein. Suitable host cells include prokaryotic or eukaryotic cells, and also include but are not limited to bacteria, yeast cells, fungi cells, plant cells, and animal cells such as insect cells and mammalian cells, e.g., murine, rat, macaque or human.

[0291] The antigen-binding molecule of the invention can be produced in bacteria. After expression, the antigen-binding molecule of the invention is isolated from the E. coli cell paste in a soluble fraction and can be purified through, e.g., affinity chromatography and/or size exclusion. Final purification can be carried out similar to the process for purifying antibody expressed e.g., in CHO cells.

[0292] In addition to prokaryotes, eukaryotic microbes such as filamentous fungi or yeast are suitable cloning or expression hosts for the antigen-binding molecule of the invention. Saccharomyces cerevisiae, or common baker's yeast, is the most commonly used among lower eukaryotic host microorganisms. However, a number of other genera, species, and strains are commonly available and useful herein, such as Schizosaccharomyces pombe, Kluyveromyces hosts such as K lactis, K. fragilis (ATCC 12424), K. bulgaricus (ATCC 16045), K. wickeramii (ATCC 24178), K waltii (ATCC 56500), K. drosophilarum (ATCC 36906), K. thermotolerans, and K. marxianus; yarrowia (EP 402 226); Pichia pastoris (EP 183 070); Candida; Trichoderma reesia (EP 244 234); Neurospora crassa; Schwanniomyces such as Schwanniomyces occidentalis; and filamentous fungi such as Neurospora, Penicillium, Tolypocladium, and Aspergillus hosts such as A. nidulans and A. niger.

[0293] Suitable host cells for the expression of glycosylated antigen-binding molecule of the invention are derived from multicellular organisms. Examples of invertebrate cells include plant and insect cells. Numerous baculoviral strains and variants and corresponding permissive insect host cells from hosts such as Spodoptera frugiperda (caterpillar), Aedes aegypti (mosquito), Aedes albopictus (mosquito), Drosophila melanogaster (fruit fly), and Bombyx mori have been identified. A variety of viral strains for transfection are publicly available, e.g., the L-1 variant of Autographa californica NPV and the Bm-5 strain of Bombyx mori NPV, and such viruses may be used as the virus herein according to the present invention, particularly for transfection of Spodoptera frugiperda cells.

[0294] Plant cell cultures of cotton, corn, potato, soybean, petunia, tomato, Arabidopsis and tobacco can also be used as hosts. Cloning and expression vectors useful in the production of proteins in plant cell culture are known to those of skill in the art. See e.g. Hiatt et al., Nature (1989) 342: 76-78, Owen et al. (1992) Bio/Technology 10: 790-794, Artsaenko et al. (1995) The Plant J 8: 745-750, and Fecker et al. (1996) Plant Mol Biol 32: 979-986.

[0295] However, interest has been greatest in vertebrate cells, and propagation of vertebrate cells in culture (tissue culture) has become a routine procedure. Examples of useful mammalian host cell lines are monkey kidney CV1 line transformed by SV40 (COS-7, ATCC CRL 1651); human embryonic kidney line (293 or 293 cells subcloned for growth in suspension culture, Graham et al., J. Gen Virol. 36: 59 (1977)); baby hamster kidney cells (BHK, ATCC CCL 10); Chinese hamster ovary cells/-DHFR (CHO, Urlaub et al., Proc. Natl. Acad. Sci. USA 77: 4216 (1980)); mouse sertoli cells (TM4, Mather, Biol. Reprod. 23: 243-251 (1980)); monkey kidney cells (CVI ATCC CCL 70); African green monkey kidney cells (VERO-76, ATCC CRL1587); human cervical carcinoma cells (HELA, ATCC CCL 2); canine kidney cells (MDCK, ATCC CCL 34); buffalo rat liver cells (BRL 3A, ATCC CRL 1442); human lung cells (W138, ATCC CCL 75); human liver cells (Hep G2,1413 8065); mouse mammary tumor (MMT 060562, ATCC CCL5 1); TRI cells (Mather et al., Annals N. Y Acad. Sci. (1982) 383: 44-68); MRC 5 cells; FS4 cells; and a human hepatoma line (Hep G2).

[0296] In a further embodiment the invention provides a process for the production of an antigen-binding molecule of the invention, said process comprising culturing a host cell of the invention under conditions allowing the expression of the antigen-binding molecule of the invention and recovering the produced antigen-binding molecule from the culture.

[0297] As used herein, the term “culturing” refers to the in vitro maintenance, differentiation, growth, proliferation and/or propagation of cells under suitable conditions in a medium. The term “expression” includes any step involved in the production of an antigen-binding molecule of the invention including, but not limited to, transcription, post-transcriptional modification, translation, post-translational modification, and secretion.

[0298] When using recombinant techniques, the antigen-binding molecule can be produced intracellularly, in the periplasmic space, or directly secreted into the medium. If the antigen-binding molecule is produced intracellularly, as a first step, the particulate debris, either host cells or lysed fragments, are removed, for example, by centrifugation or ultrafiltration. Carter et al., Bio/Technology 10: 163-167 (1992) describe a procedure for isolating antibodies which are secreted to the periplasmic space of E. coli. Briefly, cell paste is thawed in the presence of sodium acetate (pH 3.5), EDTA, and phenylmethylsulfonylfluoride (PMSF) over about 30 min. Cell debris can be removed by centrifugation. Where the antibody is secreted into the medium, supernatants from such expression systems are generally first concentrated using a commercially available protein concentration filter, for example, an Amicon or Millipore Pellicon ultrafiltration unit. A protease inhibitor such as PMSF may be included in any of the foregoing steps to inhibit proteolysis and antibiotics may be included to prevent the growth of adventitious contaminants.

[0299] The antigen-binding molecule of the invention prepared from the host cells can be recovered or purified using, for example, hydroxylapatite chromatography, gel electrophoresis, dialysis, and affinity chromatography. Other techniques for protein purification such as fractionation on an ion-exchange column, ethanol precipitation, Reverse Phase HPLC, chromatography on silica, chromatography on heparin SEPHAROSE™, chromatography on an anion or cation exchange resin (such as a polyaspartic acid column), chromato-focusing, SDS-PAGE, and ammonium sulfate precipitation are also available depending on the antibody to be recovered. Where the antigen-binding molecule of the invention comprises a CH3 domain, the Bakerbond ABX resin (J. T. Baker, Phillipsburg, NJ) is useful for purification.

[0300] Affinity chromatography is a preferred purification technique. The matrix to which the affinity ligand is attached is most often agarose, but other matrices are available. Mechanically stable matrices such as controlled pore glass or poly (styrenedivinyl) benzene allow for faster flow rates and shorter processing times than can be achieved with agarose.

[0301] Moreover, the invention provides a pharmaceutical composition comprising an antigen-binding molecule of the invention or an antigen-binding molecule produced according to the process of the invention. It is preferred for the pharmaceutical composition of the invention that the homogeneity of the antigen-binding molecule is ≥80%, more preferably ≥81%, ≥82%, ≥83%, ≥84%, or ≥85%, further preferably ≥86%, ≥87%, ≥88%, ≥89%, or ≥90%, still further preferably, ≥91%, ≥92%, ≥93%, ≥94%, or ≥95% and most preferably ≥96%, ≥97%, ≥98% or ≥99%.

[0302] As used herein, the term “pharmaceutical composition” relates to a composition which is suitable for administration to a patient, preferably a human patient. The particularly preferred pharmaceutical composition of this invention comprises one or a plurality of the antigen-binding molecule(s) of the invention, preferably in a therapeutically effective amount. Preferably, the pharmaceutical composition further comprises suitable formulations of one or more (pharmaceutically effective) carriers, stabilizers, excipients, diluents, solubilizers, surfactants, emulsifiers, preservatives and/or adjuvants. Acceptable constituents of the composition are preferably nontoxic to recipients at the dosages and concentrations employed. Pharmaceutical compositions of the invention include, but are not limited to, liquid, frozen, and lyophilized compositions.

[0303] The inventive compositions may comprise a pharmaceutically acceptable carrier. In general, as used herein, “pharmaceutically acceptable carrier” means any and all aqueous and non-aqueous solutions, sterile solutions, solvents, buffers, e.g. phosphate buffered saline (PBS) solutions, water, suspensions, emulsions, such as oil/water emulsions, various types of wetting agents, liposomes, dispersion media and coatings, which are compatible with pharmaceutical administration, in particular with parenteral administration. The use of such media and agents in pharmaceutical compositions is well known in the art, and the compositions comprising such carriers can be formulated by well-known conventional methods.

[0304] Certain embodiments provide pharmaceutical compositions comprising the antigen-binding molecule of the invention and further one or more excipients such as those illustratively described in this section and elsewhere herein. Excipients can be used in the invention in this regard for a wide variety of purposes, such as adjusting physical, chemical, or biological properties of formulations, such as adjustment of viscosity, and or processes of the invention to improve effectiveness and or to stabilize such formulations and processes against degradation and spoilage due to, for instance, stresses that occur during manufacturing, shipping, storage, pre-use preparation, administration, and thereafter.

[0305] In certain embodiments, the pharmaceutical composition may contain formulation materials for the purpose of modifying, maintaining or preserving, e.g., the pH, osmolarity, viscosity, clarity, color, isotonicity, odor, sterility, stability, rate of dissolution or release, adsorption or penetration of the composition (see, REMINGTON'S PHARMACEUTICAL SCIENCES, 18″ Edition, (A. R. Genrmo, ed.), 1990, Mack Publishing Company). In such embodiments, suitable formulation materials may include, but are not limited to:
[0306] amino acids such as glycine, alanine, glutamine, asparagine, threonine, proline, 2-phenylalanine, including charged amino acids, preferably lysine, lysine acetate, arginine, glutamate and/or histidine
[0307] antimicrobials such as antibacterial and antifungal agents
[0308] antioxidants such as ascorbic acid, methionine, sodium sulfite or sodium hydrogen-sulfite;
[0309] buffers, buffer systems and buffering agents which are used to maintain the composition at physiological pH or at a slightly lower pH, preferably a lower pH of 4.0 to 6.5; examples of buffers are borate, bicarbonate, Tris-HCl, citrates, phosphates or other organic acids, succinate, phosphate, and histidine; for example Tris buffer of about pH 7.0-8.5;
[0310] non-aqueous solvents such as propylene glycol, polyethylene glycol, vegetable oils such as olive oil, and injectable organic esters such as ethyl oleate;
[0311] aqueous carriers including water, alcoholic/aqueous solutions, emulsions or suspensions, including saline and buffered media;
[0312] biodegradable polymers such as polyesters;
[0313] bulking agents such as mannitol or glycine;
[0314] chelating agents such as ethylenediamine tetraacetic acid (EDTA);
[0315] isotonic and absorption delaying agents;
[0316] complexing agents such as caffeine, polyvinylpyrrolidone, beta-cyclodextrin or hydroxypropyl-beta-cyclodextrin)
[0317] fillers;
[0318] monosaccharides; disaccharides; and other carbohydrates (such as glucose, mannose or dextrins); carbohydrates may be non-reducing sugars, preferably trehalose, sucrose, octasulfate, sorbitol or xylitol;
[0319] (low molecular weight) proteins, polypeptides or proteinaceous carriers such as human or bovine serum albumin, gelatin or immunoglobulins, preferably of human origin;
[0320] coloring and flavouring agents;
[0321] sulfur containing reducing agents, such as glutathione, thioctic acid, sodium thioglycolate, thioglycerol, [alpha]-monothioglycerol, and sodium thio sulfate
[0322] diluting agents;
[0323] emulsifying agents;
[0324] hydrophilic polymers such as polyvinylpyrrolidone)
[0325] salt-forming counter-ions such as sodium;
[0326] preservatives such as antimicrobials, anti-oxidants, chelating agents, inert gases and the like; examples are: benzalkonium chloride, benzoic acid, salicylic acid, thimerosal, phenethyl alcohol, methylparaben, propylparaben, chlorhexidine, sorbic acid or hydrogen peroxide);
[0327] metal complexes such as Zn-protein complexes;
[0328] solvents and co-solvents (such as glycerin, propylene glycol or polyethylene glycol);
[0329] sugars and sugar alcohols, such as trehalose, sucrose, octasulfate, mannitol, sorbitol or xylitol stachyose, mannose, sorbose, xylose, ribose, myoinisitose, galactose, lactitol, ribitol, myoinisitol, galactitol, glycerol, cyclitols (e.g., inositol), polyethylene glycol; and polyhydric sugar alcohols;
[0330] suspending agents;
[0331] surfactants or wetting agents such as pluronics, PEG, sorbitan esters, polysorbates such as polysorbate 20, polysorbate, triton, tromethamine, lecithin, cholesterol, tyloxapal; surfactants may be detergents, preferably with a molecular weight of >1.2 KD and/or a polyether, preferably with a molecular weight of >3 KD; non-limiting examples for preferred detergents are Tween 20, Tween 40, Tween 60, Tween 80 and Tween 85; non-limiting examples for preferred polyethers are PEG 3000, PEG 3350, PEG 4000 and PEG 5000;
[0332] stability enhancing agents such as sucrose or sorbitol;
[0333] tonicity enhancing agents such as alkali metal halides, preferably sodium or potassium chloride, mannitol sorbitol;
[0334] parenteral delivery vehicles including sodium chloride solution, Ringer's dextrose, dextrose and sodium chloride, lactated Ringer's, or fixed oils;
[0335] intravenous delivery vehicles including fluid and nutrient replenishers, electrolyte replenishers (such as those based on Ringer's dextrose).

[0336] In the context of the present invention, a pharmaceutical composition, which is preferably a liquid composition or may be a solid composition obtained by lyophilisation or may be a reconstituted liquid composition comprises
[0337] (a) an antigen-binding molecule comprising at least three domains, wherein:
[0338] a first domain binds to a target cell surface antigen and has an isoelectric point (pI) in the range of 4 to 9,5;
[0339] a second domain binds to a second antigen; and has a pI in the range of 8 to 10, preferably 8.5 to 9.0; and
[0340] optionally a third domain comprises two polypeptide monomers, each comprising a hinge, a CH2 domain and a CH3 domain, wherein said two polypeptide monomers are fused to each other via a peptide linker;
[0341] (b) at least one buffer agent;
[0342] (c) at least one saccharide; and
[0343] (d) at least one surfactant;
[0344] and wherein the pH of the pharmaceutical composition is in the range of 3.5 to 6.

[0345] [24] It is further envisaged in the context of the present invention that the at least one buffer agent is present at a concentration range of 5 to 200 mM, more preferably at a concentration range of 10 to 50 mM. It is envisaged in the context of the present invention that the at least one saccharide is selected from the group consisting of monosaccharide, disaccharide, cyclic polysaccharide, sugar alcohol, linear branched dextran or linear non-branched dextran. It is also envisaged in the context of the present invention that the disaccharide is selected from the group consisting of sucrose, trehalose and mannitol, sorbitol, and combinations thereof. It is further envisaged in the context of the present invention that the sugar alcohol is sorbitol. It is envisaged in the context of the present invention that the at least one saccharide is present at a concentration in the range of 1 to 15% (m/V), preferably in a concentration range of 9 to 12% (m/V).

[0346] It is also envisaged in the context of the present invention that the at least one surfactant is selected from the group consisting of polysorbate 20, polysorbate 40, polysorbate 60, polysorbate 80, poloxamer 188, pluronic F68, triton X-100, polyoxyethylen, PEG 3350, PEG 4000 and combinations thereof. It is further envisaged in the context of the present invention that the at least one surfactant is present at a concentration in the range of 0.004 to 0.5% (m/V), preferably in the range of 0.001 to 0.01% (m/V). It is envisaged in the context of the present invention that the pH of the composition is in the range of 4.0 to 5.0, preferably 4.2. It is also envisaged in the context of the present invention that the pharmaceutical composition has an osmolarity in the range of 150 to 500 mOsm. It is further envisaged in the context of the present invention that the pharmaceutical composition further comprises an excipient selected from the group consisting of, one or more polyol and one or more amino acid. It is envisaged in the context of the present invention that said one or more excipient is present in the concentration range of 0.1 to 15% (w/V).

[0347] It is also envisaged in the context of the present invention that the pharmaceutical composition comprises
[0348] (a) the antigen-binding molecule as discussed above,
[0349] (b) 10 mM glutamate or acetate,
[0350] (c) 9% (m/V) sucrose or 6% (m/V) sucrose and 6% (m/V) hydroxypropyl-β-cyclodextrin,
[0351] (d) 0.01% (m/V) polysorbate 80
[0352] and wherein the pH of the liquid pharmaceutical composition is 4.2.

[0353] It is further envisaged in the context of the present invention that the antigen-binding molecule is present in a concentration range of 0.1 to 8 mg/ml, preferably of 0.2-2.5 mg/ml, more preferably of 0.25-1.0 mg/ml.

[0354] It is evident to those skilled in the art that the different constituents of the pharmaceutical composition (e.g., those listed above) can have different effects, for example, and amino acid can act as a buffer, a stabilizer and/or an antioxidant; mannitol can act as a bulking agent and/or a tonicity enhancing agent; sodium chloride can act as delivery vehicle and/or tonicity enhancing agent; etc.

[0355] It is envisaged that the composition of the invention may comprise, in addition to the polypeptide of the invention defined herein, further biologically active agents, depending on the intended use of the composition. Such agents may be drugs acting on the gastro-intestinal system, drugs acting as cytostatica, drugs preventing hyperurikemia, drugs inhibiting immunoreactions (e.g. corticosteroids), drugs modulating the inflammatory response, drugs acting on the circulatory system and/or agents such as cytokines known in the art. It is also envisaged that the antigen-binding molecule of the present invention is applied in a co-therapy, i.e., in combination with another anti-cancer medicament.

[0356] In certain embodiments, the optimal pharmaceutical composition will be determined by one skilled in the art depending upon, for example, the intended route of administration, delivery format and desired dosage. See, for example, REMINGTON'S PHARMACEUTICAL SCIENCES, supra. In certain embodiments, such compositions may influence the physical state, stability, rate of in vivo release and rate of in vivo clearance of the antigen-binding molecule of the invention. In certain embodiments, the primary vehicle or carrier in a pharmaceutical composition may be either aqueous or non-aqueous in nature. For example, a suitable vehicle or carrier may be water for injection, physiological saline solution or artificial cerebrospinal fluid, possibly supplemented with other materials common in compositions for parenteral administration. Neutral buffered saline or saline mixed with serum albumin are further exemplary vehicles. In certain embodiments, the antigen-binding molecule of the invention compositions may be prepared for storage by mixing the selected composition having the desired degree of purity with optional formulation agents (REMINGTON'S PHARMACEUTICAL SCIENCES, supra) in the form of a lyophilized cake or an aqueous solution. Further, in certain embodiments, the antigen-binding molecule of the invention may be formulated as a lyophilizate using appropriate excipients such as sucrose.

[0357] When parenteral administration is contemplated, the therapeutic compositions for use in this invention may be provided in the form of a pyrogen-free, parenterally acceptable aqueous solution comprising the desired antigen-binding molecule of the invention in a pharmaceutically acceptable vehicle. A particularly suitable vehicle for parenteral injection is sterile distilled water in which the antigen-binding molecule of the invention is formulated as a sterile, isotonic solution, properly preserved. In certain embodiments, the preparation can involve the formulation of the desired molecule with an agent, such as injectable microspheres, bio-erodible particles, polymeric compounds (such as polylactic acid or polyglycolic acid), beads or liposomes, that may provide controlled or sustained release of the product which can be delivered via depot injection. In certain embodiments, hyaluronic acid may also be used, having the effect of promoting sustained duration in the circulation. In certain embodiments, implantable drug delivery devices may be used to introduce the desired antigen-binding molecule.

[0358] Additional pharmaceutical compositions will be evident to those skilled in the art, including formulations involving the antigen-binding molecule of the invention in sustained- or controlled-delivery/release formulations. Techniques for formulating a variety of other sustained- or controlled-delivery means, such as liposome carriers, bio-erodible microparticles or porous beads and depot injections, are also known to those skilled in the art. See, for example, International Patent Application No. PCT/US93/00829, which describes controlled release of porous polymeric microparticles for delivery of pharmaceutical compositions. Sustained-release preparations may include semipermeable polymer matrices in the form of shaped articles, e.g., films, or microcapsules. Sustained release matrices may include polyesters, hydrogels, polylactides (as disclosed in U.S. Pat. No. 3,773,919 and European Patent Application Publication No. EP 058481), copolymers of L-glutamic acid and gamma ethyl-L-glutamate (Sidman et al., 1983, Biopolymers 2:547-556), poly (2-hydroxyethyl-methacrylate) (Langer et al., 1981, J. Biomed. Mater. Res. 15:167-277 and Langer, 1982, Chem. Tech. 12:98-105), ethylene vinyl acetate (Langer et al., 1981, supra) or poly-D(−)-3-hydroxybutyric acid (European Patent Application Publication No. EP 133,988). Sustained release compositions may also include liposomes that can be prepared by any of several methods known in the art. See, e.g., Eppstein et al., 1985, Proc. Natl. Acad. Sci. U.S.A. 82:3688-3692; European Patent Application Publication Nos. EP 036,676; EP 088,046 and EP 143,949.

[0359] The antigen-binding molecule may also be entrapped in microcapsules prepared, for example, by coacervation techniques or by interfacial polymerization (for example, hydroxymethylcellulose or gelatine-microcapsules and poly (methylmethacylate) microcapsules, respectively), in colloidal drug delivery systems (for example, liposomes, albumin microspheres, microemulsions, nanoparticles and nanocapsules), or in macroemulsions. Such techniques are disclosed in Remington's Pharmaceutical Sciences, 16th edition, Oslo, A., Ed., (1980).

[0360] Pharmaceutical compositions used for in vivo administration are typically provided as sterile preparations. Sterilization can be accomplished by filtration through sterile filtration membranes. When the composition is lyophilized, sterilization using this method may be conducted either prior to or following lyophilization and reconstitution. Compositions for parenteral administration can be stored in lyophilized form or in a solution. Parenteral compositions generally are placed into a container having a sterile access port, for example, an intravenous solution bag or vial having a stopper pierceable by a hypodermic injection needle.

[0361] Another aspect of the invention includes self-buffering antigen-binding molecule of the invention formulations, which can be used as pharmaceutical compositions, as described in international patent application WO 06138181A2 (PCT/US2006/022599). A variety of expositions are available on protein stabilization and formulation materials and methods useful in this regard, such as Arakawa et al., “Solvent interactions in pharmaceutical formulations,” Pharm Res. 8(3): 285⁻⁹¹ (1991); Kendrick et al., “Physical stabilization of proteins in aqueous solution” in: RATIONAL DESIGN OF STABLE PROTEIN FORMULATIONS: THEORY AND PRACTICE, Carpenter and Manning, eds. Pharmaceutical Biotechnology. 13: 61-84 (2002), and Randolph et al., “Surfactant-protein interactions”, Pharm Biotechnol. 13: 159-75 (2002), see particularly the parts pertinent to excipients and processes of the same for self-buffering protein formulations in accordance with the current invention, especially as to protein pharmaceutical products and processes for veterinary and/or human medical uses.

[0362] Salts may be used in accordance with certain embodiments of the invention to, for example, adjust the ionic strength and/or the isotonicity of a formulation and/or to improve the solubility and/or physical stability of a protein or other ingredient of a composition in accordance with the invention. As is well known, ions can stabilize the native state of proteins by binding to charged residues on the protein's surface and by shielding charged and polar groups in the protein and reducing the strength of their electrostatic interactions, attractive, and repulsive interactions. Ions also can stabilize the denatured state of a protein by binding to, in particular, the denatured peptide linkages (—CONH) of the protein. Furthermore, ionic interaction with charged and polar groups in a protein also can reduce intermolecular electrostatic interactions and, thereby, prevent or reduce protein aggregation and insolubility.

[0363] Ionic species differ significantly in their effects on proteins. A number of categorical rankings of ions and their effects on proteins have been developed that can be used in formulating pharmaceutical compositions in accordance with the invention. One example is the Hofmeister series, which ranks ionic and polar non-ionic solutes by their effect on the conformational stability of proteins in solution. Stabilizing solutes are referred to as “kosmotropic”. Destabilizing solutes are referred to as “chaotropic”. Kosmotropes commonly are used at high concentrations (e.g., >1 molar ammonium sulfate) to precipitate proteins from solution (“salting-out”). Chaotropes commonly are used to denture and/or to solubilize proteins (“salting-in”). The relative effectiveness of ions to “salt-in” and “salt-out” defines their position in the Hofineister series.

[0364] Free amino acids can be used in the antigen-binding molecule of the invention formulations in accordance with various embodiments of the invention as bulking agents, stabilizers, and antioxidants, as well as other standard uses. Lysine, proline, serine, and alanine can be used for stabilizing proteins in a formulation. Glycine is useful in lyophilization to ensure correct cake structure and properties. Arginine may be useful to inhibit protein aggregation, in both liquid and lyophilized formulations. Methionine is useful as an antioxidant.

[0365] Polyols include sugars, e.g., mannitol, sucrose, and sorbitol and polyhydric alcohols such as, for instance, glycerol and propylene glycol, and, for purposes of discussion herein, polyethylene glycol (PEG) and related substances. Polyols are kosmotropic. They are useful stabilizing agents in both liquid and lyophilized formulations to protect proteins from physical and chemical degradation processes. Polyols also are useful for adjusting the tonicity of formulations. Among polyols useful in select embodiments of the invention is mannitol, commonly used to ensure structural stability of the cake in lyophilized formulations. It ensures structural stability to the cake. It is generally used with a lyoprotectant, e.g., sucrose. Sorbitol and sucrose are among preferred agents for adjusting tonicity and as stabilizers to protect against freeze-thaw stresses during transport or the preparation of bulks during the manufacturing process. Reducing sugars (which contain free aldehyde or ketone groups), such as glucose and lactose, can glycate surface lysine and arginine residues. Therefore, they generally are not among preferred polyols for use in accordance with the invention. In addition, sugars that form such reactive species, such as sucrose, which is hydrolyzed to fructose and glucose under acidic conditions, and consequently engenders glycation, also is not among preferred polyols of the invention in this regard. PEG is useful to stabilize proteins and as a cryoprotectant and can be used in the invention in this regard.

[0366] Embodiments of the antigen-binding molecule of the invention formulations further comprise surfactants. Protein molecules may be susceptible to adsorption on surfaces and to denaturation and consequent aggregation at air-liquid, solid-liquid, and liquid-liquid interfaces. These effects generally scale inversely with protein concentration. These deleterious interactions generally scale inversely with protein concentration and typically are exacerbated by physical agitation, such as that generated during the shipping and handling of a product. Surfactants routinely are used to prevent, minimize, or reduce surface adsorption. Useful surfactants in the invention in this regard include polysorbate 20, polysorbate 80, other fatty acid esters of sorbitan polyethoxylates, and poloxamer 188. Surfactants also are commonly used to control protein conformational stability. The use of surfactants in this regard is protein-specific since, any given surfactant typically will stabilize some proteins and destabilize others.

[0367] Polysorbates are susceptible to oxidative degradation and often, as supplied, contain sufficient quantities of peroxides to cause oxidation of protein residue side-chains, especially methionine. Consequently, polysorbates should be used carefully, and when used, should be employed at their lowest effective concentration. In this regard, polysorbates exemplify the general rule that excipients should be used in their lowest effective concentrations.

[0368] Embodiments of the antigen-binding molecule of the invention formulations further comprise one or more antioxidants. To some extent deleterious oxidation of proteins can be prevented in pharmaceutical formulations by maintaining proper levels of ambient oxygen and temperature and by avoiding exposure to light. Antioxidant excipients can be used as well to prevent oxidative degradation of proteins. Among useful antioxidants in this regard are reducing agents, oxygen/free-radical scavengers, and chelating agents. Antioxidants for use in therapeutic protein formulations in accordance with the invention preferably are water-soluble and maintain their activity throughout the shelf life of a product. EDTA is a preferred antioxidant in accordance with the invention in this regard. Antioxidants can damage proteins. For instance, reducing agents, such as glutathione in particular, can disrupt intramolecular disulfide linkages. Thus, antioxidants for use in the invention are selected to, among other things, eliminate or sufficiently reduce the possibility of themselves damaging proteins in the formulation.

[0369] Formulations in accordance with the invention may include metal ions that are protein co-factors and that are necessary to form protein coordination complexes, such as zinc necessary to form certain insulin suspensions. Metal ions also can inhibit some processes that degrade proteins. However, metal ions also catalyze physical and chemical processes that degrade proteins. Magnesium ions (10-120 mM) can be used to inhibit isomerization of aspartic acid to isoaspartic acid. Ca⁺² ions (up to 100 mM) can increase the stability of human deoxyribonuclease. Mg⁺², Mn⁺², and Zn⁺² however, can destabilize rhDNase. Similarly, Ca⁺² and Sr⁺² can stabilize Factor VIII, it can be destabilized by Mg⁺², Mn⁺² and Zn⁺², Cu⁺² and Fe⁺², and its aggregation can be increased by Al⁺³ ions.

[0370] Embodiments of the antigen-binding molecule of the invention formulations further comprise one or more preservatives. Preservatives are necessary when developing multi-dose parenteral formulations that involve more than one extraction from the same container. Their primary function is to inhibit microbial growth and ensure product sterility throughout the shelf-life or term of use of the drug product. Commonly used preservatives include benzyl alcohol, phenol and m-cresol. Although preservatives have a long history of use with small-molecule parenterals, the development of protein formulations that includes preservatives can be challenging. Preservatives almost always have a destabilizing effect (aggregation) on proteins, and this has become a major factor in limiting their use in multi-dose protein formulations. To date, most protein drugs have been formulated for single-use only. However, when multi-dose formulations are possible, they have the added advantage of enabling patient convenience, and increased marketability. A good example is that of human growth hormone (hGH) where the development of preserved formulations has led to commercialization of more convenient, multi-use injection pen presentations. At least four such pen devices containing preserved formulations of hGH are currently available on the market. Norditropin (liquid, Novo Nordisk), Nutropin AQ (liquid, Genentech) & Genotropin (lyophilized—dual chamber cartridge, Pharmacia & Upjohn) contain phenol while Somatrope (Eli Lilly) is formulated with m-cresol. Several aspects need to be considered during the formulation and development of preserved dosage forms. The effective preservative concentration in the drug product must be optimized. This requires testing a given preservative in the dosage form with concentration ranges that confer anti-microbial effectiveness without compromising protein stability.

[0371] As may be expected, development of liquid formulations containing preservatives are more challenging than lyophilized formulations. Freeze-dried products can be lyophilized without the preservative and reconstituted with a preservative containing diluent at the time of use. This shortens the time for which a preservative is in contact with the protein, significantly minimizing the associated stability risks. With liquid formulations, preservative effectiveness and stability should be maintained over the entire product shelf-life (about 18 to 24 months). An important point to note is that preservative effectiveness should be demonstrated in the final formulation containing the active drug and all excipient components.

[0372] The antigen-binding molecules disclosed herein may also be formulated as immuno-liposomes. A “liposome” is a small vesicle composed of various types of lipids, phospholipids and/or surfactant which is useful for delivery of a drug to a mammal. The components of the liposome are commonly arranged in a bilayer formation, similar to the lipid arrangement of biological membranes. Liposomes containing the antigen-binding molecule are prepared by methods known in the art, such as described in Epstein et al., Proc. Natl. Acad. Sci. USA, 82: 3688 (1985); Hwang et al., Proc. Natl Acad. Sci. USA, 77: 4030 (1980); U.S. Pat. Nos. 4,485,045 and 4,544,545; and WO 97/38731. Liposomes with enhanced circulation time are disclosed in U.S. Pat. No. 5,013,556. Particularly useful liposomes can be generated by the reverse phase evaporation method with a lipid composition comprising phosphatidylcholine, cholesterol and PEG-derivatized phosphatidylethanolamine (PEG-PE). Liposomes are extruded through filters of defined pore size to yield liposomes with the desired diameter. Fab′ fragments of the antigen-binding molecule of the present invention can be conjugated to the liposomes as described in Martin et al. J. Biol. Chem. 257: 286-288 (1982) via a disulfide interchange reaction. A chemotherapeutic agent is optionally contained within the liposome. See Gabizon et al. J. National Cancer Inst. 81 (19) 1484 (1989).

[0373] Once the pharmaceutical composition has been formulated, it may be stored in sterile vials as a solution, suspension, gel, emulsion, solid, crystal, or as a dehydrated or lyophilized powder. Such formulations may be stored either in a ready-to-use form or in a form (e.g., lyophilized) that is reconstituted prior to administration.

[0374] The biological activity of the pharmaceutical composition defined herein can be determined for instance by cytotoxicity assays, as described in the following examples, in WO 99/54440 or by Schlereth et al. (Cancer Immunol. Immunother. 20 (2005), 1-12). “Efficacy” or “in vivo efficacy” as used herein refers to the response to therapy by the pharmaceutical composition of the invention, using e.g. standardized NCI response criteria. The success or in vivo efficacy of the therapy using a pharmaceutical composition of the invention refers to the effectiveness of the composition for its intended purpose, i.e. the ability of the composition to cause its desired effect, i.e. depletion of pathologic cells, e.g. tumor cells. The in vivo efficacy may be monitored by established standard methods for the respective disease entities including, but not limited to white blood cell counts, differentials, Fluorescence Activated Cell Sorting, bone marrow aspiration. In addition, various disease specific clinical chemistry parameters and other established standard methods may be used. Furthermore, computer-aided tomography, X-ray, nuclear magnetic resonance tomography (e.g. for National Cancer Institute-criteria based response assessment [Cheson B D, Homing S J, Coiffier B, Shipp M A, Fisher R I, Connors J M, Lister T A, Vose J, Grillo-Lopez A, Hagenbeek A, Cabanillas F, Klippensten D, Hiddemann W, Castellino R, Harris N L, Armitage J O, Carter W, Hoppe R, Canellos G P. Report of an international workshop to standardize response criteria for non-Hodgkin's lymphomas. NCI Sponsored International Working Group. J Clin Oncol. 1999 April; 17(4):1244]), positron-emission tomography scanning, white blood cell counts, differentials, Fluorescence Activated Cell Sorting, bone marrow aspiration, lymph node biopsies/histologies, and various lymphoma specific clinical chemistry parameters (e.g. lactate dehydrogenase) and other established standard methods may be used.

[0375] Another major challenge in the development of drugs such as the pharmaceutical composition of the invention is the predictable modulation of pharmacokinetic properties. To this end, a pharmacokinetic profile of the drug candidate, i.e. a profile of the pharmacokinetic parameters that affect the ability of a particular drug to treat a given condition, can be established. Pharmacokinetic parameters of the drug influencing the ability of a drug for treating a certain disease entity include, but are not limited to: half-life, volume of distribution, hepatic first-pass metabolism and the degree of blood serum binding. The efficacy of a given drug agent can be influenced by each of the parameters mentioned above. It is an envisaged characteristic of the antigen-binding molecules of the present invention provided with the specific FC modality that they comprise, for example, differences in pharmacokinetic behavior. A half-life extended targeting antigen-binding molecule according to the present invention preferably shows a surprisingly increased residence time in vivo in comparison to “canonical” non-HLE versions of said antigen-binding molecule.

[0376] “Half-life” means the time where 50% of an administered drug are eliminated through biological processes, e.g. metabolism, excretion, etc. By “hepatic first-pass metabolism” is meant the propensity of a drug to be metabolized upon first contact with the liver, i.e. during its first pass through the liver. “Volume of distribution” means the degree of retention of a drug throughout the various compartments of the body, like e.g. intracellular and extracellular spaces, tissues and organs, etc. and the distribution of the drug within these compartments. “Degree of blood serum binding” means the propensity of a drug to interact with and bind to blood serum proteins, such as albumin, leading to a reduction or loss of biological activity of the drug.

[0377] Pharmacokinetic parameters also include bioavailability, lag time (Tlag), Tmax, absorption rates, more onset and/or Cmax for a given amount of drug administered. “Bioavailability” means the amount of a drug in the blood compartment. “Lag time” means the time delay between the administration of the drug and its detection and measurability in blood or plasma. “Tmax” is the time after which maximal blood concentration of the drug is reached, and “Cmax” is the blood concentration maximally obtained with a given drug. The time to reach a blood or tissue concentration of the drug which is required for its biological effect is influenced by all parameters. Pharmacokinetic parameters of bispecific antigen-binding molecules exhibiting cross-species specificity, which may be determined in preclinical animal testing in non-chimpanzee primates as outlined above, are also set forth e.g. in the publication by Schlereth et al. (Cancer Immunol. Immunother. 20 (2005), 1-12).

[0378] In a preferred aspect of the invention the pharmaceutical composition is stable for at least four weeks at about −20° C. As apparent from the appended examples the quality of an antigen-binding molecule of the invention vs. the quality of corresponding state of the art antigen-binding molecules may be tested using different systems. Those tests are understood to be in line with the “ICH Harmonised Tripartite Guideline: Stability Testing of Biotechnological Biological Products Q5C and Specifications: Test procedures and Acceptance Criteria for Biotech Biotechnological Biological Products Q6B” and, thus are elected to provide a stability-indicating profile that provides certainty that changes in the identity, purity and potency of the product are detected. It is well accepted that the term purity is a relative term. Due to the effect of glycosylation, deamidation, or other heterogeneities, the absolute purity of a biotechnological/biological product should be typically assessed by more than one method and the purity value derived is method-dependent. For the purpose of stability testing, tests for purity should focus on methods for determination of degradation products.

[0379] For the assessment of the quality of a pharmaceutical composition comprising an antigen-binding molecule of the invention may be analyzed e.g. by analyzing the content of soluble aggregates in a solution (HMWS per size exclusion). It is preferred that stability for at least four weeks at about −20° C. is characterized by a content of less than 1.5% HMWS, preferably by less than 1% HMWS.

[0380] A preferred formulation for the antigen-binding molecule as a pharmaceutical composition may e.g. comprise the components of a formulation as described below:
[0381] Formulation:
   [0382] potassium phosphate, L-arginine hydrochloride, trehalose dihydrate, polysorbate 80 at pH 6.0

[0383] Other examples for the assessment of the stability of an antigen-binding molecule of the invention in form of a pharmaceutical composition are provided in the appended examples 4-12. In those examples embodiments of antigen-binding molecules of the invention are tested with respect to different stress conditions in different pharmaceutical formulations and the results compared with other half-life extending (HLE) formats of bispecific T cell engaging antigen-binding molecule known from the art. In general, it is envisaged that antigen-binding molecules provided with the specific FC modality according to the present invention are typically more stable over a broad range of stress conditions such as temperature and light stress, both compared to antigen-binding molecules provided with different HLE formats and without any HLE format (e.g. “canonical” antigen-binding molecules). Said temperature stability may relate both to decreased (below room temperature including freezing) and increased (above room temperature including temperatures up to or above body temperature) temperature. As the person skilled in the art will acknowledge, such improved stability with regard to stress, which is hardly avoidable in clinical practice, makes the antigen-binding molecule safer because less degradation products will occur in clinical practice. In consequence, said increased stability means increased safety.

[0384] One embodiment provides the antigen-binding molecule of the invention or the antigen-binding molecule produced according to the process of the invention for use in the prevention, treatment or amelioration of a cancer correlating with CD20 and CD22 expression or CD20 and CD22 overexpression, such as prostate cancer.

[0385] The formulations described herein are useful as pharmaceutical compositions in the treatment, amelioration and/or prevention of the pathological medical condition as described herein in a patient in need thereof. The term “treatment” refers to both therapeutic treatment and prophylactic or preventative measures. Treatment includes the application or administration of the formulation to the body, an isolated tissue, or cell from a patient who has a disease/disorder, a symptom of a disease/disorder, or a predisposition toward a disease/disorder, with the purpose to cure, heal, alleviate, relieve, alter, remedy, ameliorate, improve, or affect the disease, the symptom of the disease, or the predisposition toward the disease.

[0386] The term “amelioration” as used herein refers to any improvement of the disease state of a patient having a disease as specified herein below, by the administration of an antigen-binding molecule according to the invention to a subject in need thereof. Such an improvement may also be seen as a slowing or stopping of the progression of the patient's disease. The term “prevention” as used herein means the avoidance of the occurrence or re-occurrence of a patient having a tumor or cancer or a metastatic cancer as specified herein below, by the administration of an antigen-binding molecule according to the invention to a subject in need thereof.

[0387] The term “disease” refers to any condition that would benefit from treatment with the antigen-binding molecule or the pharmaceutic composition described herein. This includes chronic and acute disorders or diseases including those pathological conditions that predispose the mammal to the disease in question.

[0388] A “neoplasm” is an abnormal growth of tissue, usually but not always forming a mass. When also forming a mass, it is commonly referred to as a “tumor”. Neoplasms or tumors or can be benign, potentially malignant (pre-cancerous), or malignant. Malignant neoplasms are commonly called cancer. They usually invade and destroy the surrounding tissue and may form metastases, i.e., they spread to other parts, tissues or organs of the body. Hence, the term “metatstatic cancer” encompasses metastases to other tissues or organs than the one of the original tumor. Lymphomas and leukemias are lymphoid neoplasms. For the purposes of the present invention, they are also encompassed by the terms “tumor” or “cancer”.

[0389] The term “viral disease” describes diseases, which are the result of a viral infection of a subject.

[0390] The term “immunological disorder” as used herein describes in line with the common definition of this term immunological disorders such as autoimmune diseases, hypersensitivities, immune deficiencies.

[0391] In one embodiment the invention provides a method for the treatment or amelioration of a cancer correlating with CD20 and CD22 expression or CD20 and CD22 overexpression, comprising the step of administering to a subject in need thereof the antigen-binding molecule of the invention, or the antigen-binding molecule produced according to the process of the invention. The CD20 and CD22xCD3bispecific single chain antibody is particularly advantageous for the therapy of cancer, preferably solid tumors, more preferably carcinomas and prostate cancer.

[0392] The terms “subject in need” or those “in need of treatment” includes those already with the disorder, as well as those in which the disorder is to be prevented. The subject in need or “patient” includes human and other mammalian subjects that receive either prophylactic or therapeutic treatment.

[0393] The antigen-binding molecule of the invention will generally be designed for specific routes and methods of administration, for specific dosages and frequencies of administration, for specific treatments of specific diseases, with ranges of bio-availability and persistence, among other things. The materials of the composition are preferably formulated in concentrations that are acceptable for the site of administration.

[0394] Formulations and compositions thus may be designed in accordance with the invention for delivery by any suitable route of administration. In the context of the present invention, the routes of administration include, but are not limited to
[0395] topical routes (such as epicutaneous, inhalational, nasal, opthalmic, auricular/aural, vaginal, mucosal);
[0396] enteral routes (such as oral, gastrointestinal, sublingual, sublabial, buccal, rectal); and
[0397] parenteral routes (such as intravenous, intraarterial, intraosseous, intramuscular, intracerebral, intracerebroventricular, epidural, intrathecal, subcutaneous, intraperitoneal, extra-amniotic, intraarticular, intracardiac, intradermal, intralesional, intrauterine, intravesical, intravitreal, transdermal, intranasal, transmucosal, intrasynovial, intraluminal).

[0398] The pharmaceutical compositions and the antigen-binding molecule of this invention are particularly useful for parenteral administration, e.g., subcutaneous or intravenous delivery, for example by injection such as bolus injection, or by infusion such as continuous infusion. Pharmaceutical compositions may be administered using a medical device. Examples of medical devices for administering pharmaceutical compositions are described in U.S. Pat. Nos. 4,475,196; 4,439,196; 4,447,224; 4,447, 233; 4,486,194; 4,487,603; 4,596,556; 4,790,824; 4,941,880; 5,064,413; 5,312,335; 5,312,335; 5,383,851; and 5,399,163.

[0399] In particular, the present invention provides for an uninterrupted administration of the suitable composition. As a non-limiting example, uninterrupted or substantially uninterrupted, i.e. continuous administration may be realized by a small pump system worn by the patient for metering the influx of therapeutic agent into the body of the patient. The pharmaceutical composition comprising the antigen-binding molecule of the invention can be administered by using said pump systems. Such pump systems are generally known in the art, and commonly rely on periodic exchange of cartridges containing the therapeutic agent to be infused. When exchanging the cartridge in such a pump system, a temporary interruption of the otherwise uninterrupted flow of therapeutic agent into the body of the patient may ensue. In such a case, the phase of administration prior to cartridge replacement and the phase of administration following cartridge replacement would still be considered within the meaning of the pharmaceutical means and methods of the invention together make up one “uninterrupted administration” of such therapeutic agent.

[0400] The continuous or uninterrupted administration of the antigen-binding molecules of the invention may be intravenous or subcutaneous by way of a fluid delivery device or small pump system including a fluid driving mechanism for driving fluid out of a reservoir and an actuating mechanism for actuating the driving mechanism. Pump systems for subcutaneous administration may include a needle or a cannula for penetrating the skin of a patient and delivering the suitable composition into the patient's body. Said pump systems may be directly fixed or attached to the skin of the patient independently of a vein, artery or blood vessel, thereby allowing a direct contact between the pump system and the skin of the patient. The pump system can be attached to the skin of the patient for 24 hours up to several days. The pump system may be of small size with a reservoir for small volumes. As a non-limiting example, the volume of the reservoir for the suitable pharmaceutical composition to be administered can be between 0.1 and 50 ml.

[0401] The continuous administration may also be transdermal by way of a patch worn on the skin and replaced at intervals. One of skill in the art is aware of patch systems for drug delivery suitable for this purpose. It is of note that transdermal administration is especially amenable to uninterrupted administration, as exchange of a first exhausted patch can advantageously be accomplished simultaneously with the placement of a new, second patch, for example on the surface of the skin immediately adjacent to the first exhausted patch and immediately prior to removal of the first exhausted patch. Issues of flow interruption or power cell failure do not arise.

[0402] If the pharmaceutical composition has been lyophilized, the lyophilized material is first reconstituted in an appropriate liquid prior to administration. The lyophilized material may be reconstituted in, e.g., bacteriostatic water for injection (BWFI), physiological saline, phosphate buffered saline (PBS), or the same formulation the protein had been in prior to lyophilization.

[0403] The compositions of the present invention can be administered to the subject at a suitable dose which can be determined e.g. by dose escalating studies by administration of increasing doses of the antigen-binding molecule of the invention exhibiting cross-species specificity described herein to non-chimpanzee primates, for instance macaques. As set forth above, the antigen-binding molecule of the invention exhibiting cross-species specificity described herein can be advantageously used in identical form in preclinical testing in non-chimpanzee primates and as drug in humans. The dosage regimen will be determined by the attending physician and clinical factors. As is well known in the medical arts, dosages for any one patient depend upon many factors, including the patient's size, body surface area, age, the particular compound to be administered, sex, time and route of administration, general health, and other drugs being administered concurrently.

[0404] The term “effective dose” or “effective dosage” is defined as an amount sufficient to achieve or at least partially achieve the desired effect. The term “therapeutically effective dose” is defined as an amount sufficient to cure or at least partially arrest the disease and its complications in a patient already suffering from the disease. Amounts or doses effective for this use will depend on the condition to be treated (the indication), the delivered antigen-binding molecule, the therapeutic context and objectives, the severity of the disease, prior therapy, the patient's clinical history and response to the therapeutic agent, the route of administration, the size (body weight, body surface or organ size) and/or condition (the age and general health) of the patient, and the general state of the patient's own immune system. The proper dose can be adjusted according to the judgment of the attending physician such that it can be administered to the patient once or over a series of administrations, and in order to obtain the optimal therapeutic effect.

[0405] A typical dosage may range from about 0.1 μg/kg to up to about 30 mg/kg or more, depending on the factors mentioned above. In specific embodiments, the dosage may range from 1.0 μg/kg up to about 20 mg/kg, optionally from 10 μg/kg up to about 10 mg/kg or from 100 μg/kg up to about 5 mg/kg.

[0406] A therapeutic effective amount of an antigen-binding molecule of the invention preferably results in a decrease in severity of disease symptoms, an increase in frequency or duration of disease symptom-free periods or a prevention of impairment or disability due to the disease affliction. For treating diseases correlating with CD20 and CD22 expression as described herein above, a therapeutically effective amount of the antigen-binding molecule of the invention, here: an anti-CD20 and CD22/anti-CD3 antigen-binding molecule, preferably inhibits cell growth or tumor growth by at least about 20%, at least about 40%, at least about 50%, at least about 60%, at least about 70%, at least about 80%, or at least about 90% relative to untreated patients. The ability of a compound to inhibit tumor growth may be evaluated in an animal model predictive of efficacy

[0407] The pharmaceutical composition can be administered as a sole therapeutic or in combination with additional therapies such as anti-cancer therapies as needed, e.g. other proteinaceous and non-proteinaceous drugs. These drugs may be administered simultaneously with the composition comprising the antigen-binding molecule of the invention as defined herein or separately before or after administration of said antigen-binding molecule in timely defined intervals and doses.

[0408] The term “effective and non-toxic dose” as used herein refers to a tolerable dose of an inventive antigen-binding molecule which is high enough to cause depletion of pathologic cells, tumor elimination, tumor shrinkage or stabilization of disease without or essentially without major toxic effects. Such effective and non-toxic doses may be determined e.g. by dose escalation studies described in the art and should be below the dose inducing severe adverse side events (dose limiting toxicity, DLT).

[0409] The term “toxicity” as used herein refers to the toxic effects of a drug manifested in adverse events or severe adverse events. These side events may refer to a lack of tolerability of the drug in general and/or a lack of local tolerance after administration. Toxicity could also include teratogenic or carcinogenic effects caused by the drug.

[0410] The term “safety”, “in vivo safety” or “tolerability” as used herein defines the administration of a drug without inducing severe adverse events directly after administration (local tolerance) and during a longer period of application of the drug. “Safety”, “in vivo safety” or “tolerability” can be evaluated e.g. at regular intervals during the treatment and follow-up period. Measurements include clinical evaluation, e.g. organ manifestations, and screening of laboratory abnormalities. Clinical evaluation may be carried out and deviations to normal findings recorded/coded according to NCI-CTC and/or MedDRA standards. Organ manifestations may include criteria such as allergy/immunology, blood/bone marrow, cardiac arrhythmia, coagulation and the like, as set forth e.g. in the Common Terminology Criteria for adverse events v3.0 (CTCAE). Laboratory parameters which may be tested include for instance hematology, clinical chemistry, coagulation profile and urine analysis and examination of other body fluids such as serum, plasma, lymphoid or spinal fluid, liquor and the like. Safety can thus be assessed e.g. by physical examination, imaging techniques (i.e. ultrasound, x-ray, CT scans, Magnetic Resonance Imaging (MRI), other measures with technical devices (i.e. electrocardiogram), vital signs, by measuring laboratory parameters and recording adverse events. For example, adverse events in non-chimpanzee primates in the uses and methods according to the invention may be examined by histopathological and/or histochemical methods.

[0411] The above terms are also referred to e.g. in the Preclinical safety evaluation of biotechnology-derived pharmaceuticals S6; ICH Harmonised Tripartite Guideline; ICH Steering Committee meeting on Jul. 16, 1997.

[0412] Finally, the invention provides a kit comprising an antigen-binding molecule of the invention or produced according to the process of the invention, a pharmaceutical composition of the invention, a polynucleotide of the invention, a vector of the invention and/or a host cell of the invention.

[0413] In the context of the present invention, the term “kit” means two or more components—one of which corresponding to the antigen-binding molecule, the pharmaceutical composition, the vector or the host cell of the invention—packaged together in a container, recipient or otherwise. A kit can hence be described as a set of products and/or utensils that are sufficient to achieve a certain goal, which can be marketed as a single unit.

[0414] The kit may comprise one or more recipients (such as vials, ampoules, containers, syringes, bottles, bags) of any appropriate shape, size and material (preferably waterproof, e.g. plastic or glass) containing the antigen-binding molecule or the pharmaceutical composition of the present invention in an appropriate dosage for administration (see above). The kit may additionally contain directions for use (e.g. in the form of a leaflet or instruction manual), means for administering the antigen-binding molecule of the present invention such as a syringe, pump, infuser or the like, means for reconstituting the antigen-binding molecule of the invention and/or means for diluting the antigen-binding molecule of the invention.

[0415] The invention also provides kits for a single-dose administration unit. The kit of the invention may also contain a first recipient comprising a dried/lyophilized antigen-binding molecule and a second recipient comprising an aqueous formulation. In certain embodiments of this invention, kits containing single-chambered and multi-chambered pre-filled syringes (e.g., liquid syringes and lyosyringes) are provided.

### *****

[0416] It is noted that as used herein, the singular forms “a”, “an”, and “the”, include plural references unless the context clearly indicates otherwise. Thus, for example, reference to “a reagent” includes one or more of such different reagents and reference to “the method” includes reference to equivalent steps and methods known to those of ordinary skill in the art that could be modified or substituted for the methods described herein.

[0417] Unless otherwise indicated, the term “at least” preceding a series of elements is to be understood to refer to every element in the series. Those skilled in the art will recognize, or be able to ascertain using no more than routine experimentation, many equivalents to the specific embodiments of the invention described herein. Such equivalents are intended to be encompassed by the present invention.

[0418] The term “and/or” wherever used herein includes the meaning of “and”, “or” and “all or any other combination of the elements connected by said term”.

[0419] The term “about” or “approximately” as used herein means within 20%, preferably within 10%, and more preferably within 5% of a given value or range. It includes, however, also the concrete number, e.g., about 20 includes 20.

[0420] The term “less than” or “greater than” includes the concrete number. For example, less than 20 means less than or equal to. Similarly, more than or greater than means more than or equal to, or greater than or equal to, respectively.

[0421] Throughout this specification and the claims which follow, unless the context requires otherwise, the word “comprise”, and variations such as “comprises” and “comprising”, will be understood to imply the inclusion of a stated integer or step or group of integers or steps but not the exclusion of any other integer or step or group of integer or step. When used herein the term “comprising” can be substituted with the term “containing” or “including” or sometimes when used herein with the term “having”.

[0422] When used herein “consisting of” excludes any element, step, or ingredient not specified in the claim element. When used herein, “consisting essentially of” does not exclude materials or steps that do not materially affect the basic and novel characteristics of the claim.

[0423] In each instance herein any of the terms “comprising”, “consisting essentially of” and “consisting of” may be replaced with either of the other two terms.

[0424] It should be understood that this invention is not limited to the particular methodology, protocols, material, reagents, and substances, etc., described herein and as such can vary. The terminology used herein is for the purpose of describing particular embodiments only, and is not intended to limit the scope of the present invention, which is defined solely by the claims.

[0425] All publications and patents cited throughout the text of this specification (including all patents, patent applications, scientific publications, manufacturer's specifications, instructions, etc.), whether supra or infra, are hereby incorporated by reference in their entirety. Nothing herein is to be construed as an admission that the invention is not entitled to antedate such disclosure by virtue of prior invention. To the extent the material incorporated by reference contradicts or is inconsistent with this specification, the specification will supersede any such material.

[0426] A better understanding of the present invention and of its advantages will be obtained from the following examples, offered for illustrative purposes only. The examples are not intended to limit the scope of the present invention in any way.

### EXAMPLES

### Example 1: Productivity and Product Homogeneity Evaluation

### Protein Purification by 2-Step Fast Protein Liquid Chromatography

[0427] Akta pure purification systems (Cytiva Life Sciences) controlled by Unicorn® 7.3 software were used for affinity capture and size exclusion chromatography according to the manufacturer's specifications.

### Protein Isolation by Affinity Capture (AC) Chromatography

[0428] Capture of CD20- and CD22 targeting antigen-binding molecules was performed using HiTrap MabSelect SuRe® (5 ml column volume (CV); Cytiva Life Sciences) protein A affinity medium. The column was equilibrated with 2 CV phosphate buffered saline (PBS; without Ca2+ and Mg2+; EMD Millipore) and the protein-containing cell culture supernatant applied to the column at a flow rate of 6 ml/min. Before protein elution the column was sequentially washed with PBS and 0.5 M L-Arginine, 25 mM Tris, pH 7.5 (10 CV each) to remove unbound or weakly bounded host cell proteins.

[0429] Bound protein was eluted by application of 3 CV of protein A IgG elution buffer (90 mM NaCl, 20 mM citric acid, pH 3.0) at a flow rate of 2 ml/min and 6 ml eluate collected in an attached sample loop.

### Protein Monomer Isolation by Size Exclusion Chromatography (SEC)

[0430] Subsequently to the AC, the protein was transferred from the sample loop to a HiLoad S200 26/600 Superdex Gelfiltration SEC column (320 ml CV; Cytiva Life sciences) equilibrated before with 1.5 CV formulation buffer (10 mM citric acid, 75 mM lysine HCl, pH 7.0). Monomeric protein was then separated from HMW and LMW protein species by applying 1.5 CV of formulation buffer at a flow rate of 2.5 ml/min and finally collected in a fraction collector.

[0431] For protein stabilization to each collected fraction containing monomer, trehalose was added resulting in a final concentration of 4% trehalose. Protein concentrations were determined in addition using A280 nm optical absorption and collected fractions containing sufficiently concentrated monomeric protein were pooled. Pure monomeric protein yields were calculated based on total protein amounts after concentration to 0.25 mg/ml and filtering. SEC peak symmetry of the monomeric main peak is given by the software Unicorn® 7.3 software at the half maximum peak height.

TABLE 4
Monomer yield and SEC monomer peak symmetry of CD20
and CD22 targeting antigen-binding molecules

| | Monomer | SEC |
|---|---|---|
| | Yield at | Monomer |
| | 0.25 mg/ml | Peak |
| Construct | [mg/L] | Symmetry |
| CD20 82-A3 CC × CD22 99-F10 | 39.80 | 1.24 |
| CC × I2E × scFc (P6B) | | |
| CD20 82-D2 CC × CD22 43-A8 | 17.70 | 1.25 |
| CC × I2E × scFc (H1C) | | |
| CD20 82-A3 CC × CD22 43-F7 | 65.71 | 1.31 |
| CC × I2E × scFc (Z7Q) | | |
| CD20 82-E2 CC × CD22 43-F7 | 36.79 | 1.28 |
| CC × I2E × scFc (M8E) | | |
| CD20 82-A3 CC × CD22 44-A8 | 43.52 | 1.26 |
| CC × I2E × scFc (J1E) | | |
| CD20 82-G2 CC × CD22 44-A8 | 49.38 | 1.34 |
| CC × I2E × scFc (J9A) | | |
| CD20 82-A3 CC × CD22 16-G4 | 44.87 | 1.21 |
| CC × I2E × scFc (S5H) | | |
| CD20 82-A3 CC × CD22 17-F6 | 25.59 | 1.21 |
| CC × I2E × scFc (W6V) | | |
| CD20 82-A3 CC × CD22 53-D6 | 23.25 | 1.17 |
| CC × I2E × scFc (O3S) | | |
| CD20 82-G2 CC × CD22 53-D6 | 40.39 | 1.33 |
| CC × I2E × scFc (F9P) | | |
| CD20 82-A3 CC × CD22 53-G9 | 26.94 | 1.21 |
| CC × I2E × scFc (L4L) | | |
| CD20 82-D2 CC × CD22 53-G9 | 13.06 | 1.26 |
| CC × I2E × scFc (Z1W) | | |
| CD20 82-A3 CC × CD22 97K-A8 | 30.17 | 1.09 |
| CC × I2E × scFc (U2H) | | |
| CD20 99-E5 CC × CD22 28-B7 N65S | 3.95 | 1.82 |
| CC × I2C0 × scFc (G3P) | | |

[0432] Final protein monomer yields and SEC monomer peak symmetries of CD20 and CD22 targeting antigen-binding molecules. Yields were calculated based on the total protein amount after purification, filtration, and concentration to 0.25 mg/ml. SEC peak symmetry was calculated by Unicorn software.

### Results

[0433] All selected CD20 and CD22 dual targeting antigen-binding molecules according to the present invention show productivity above 10 mg/L in terms of the final yield in contrast to comparison molecule than CD20 99-E5 CC x CD22 28-B7 N65S CC x I2C0 x scFc. Also, the molecules according to the invention show a more homogeneous constitution than comparison molecule CD20 99-E5 CC x CD22 28-B7 N65S CC x I2C0 x scFc according to their dynamic radii below preferred threshold value 1.4. The symmetric peaks of the new molecules suggest fewer low molecular weight products or fewer folding forms and thus, improved product homogeneity.

### Example 2 Evaluation of CD20-CD22-Targeting Antigen-Binding Molecule Surface Hydrophobicity

[0434] Isolated and formulated CD20-CD22-binding T cell engager molecule and monomer adjusted to a defined protein concentration was transferred into autosampler fitting sample vials and measured on an Akta Purifier 10 FPLC system (GE Healthcare, Freiburg, Germany). A Hydrophobic Interaction Chromatography HIC column was equilibrated with formulation buffer and a defined volume of protein solution applied at a constant formulation buffer flow. Detection war done by OD280 nm optical absorption. Elution behavior was determined by peak shape respectively mathematically calculation of declining signal peak slope. Steeper slope/higher slope values indicate less hydrophobic interaction of the protein surface compared to constructs with more flat elution behavior and lower slope value.

TABLE 5
HIC elution slopes of CD20-CD22-targeting
antigen-binding molecules.

| | HIC |
|---|---|
| | Elution |
| Construct: | Slope |
| CD20 82-A3 CC × CD22 99-F10 CC × I2E × scFc | 61.7 |
| CD20 82-D2 CC × CD22 43-A8 CC × I2E × scFc | 17.4 |
| CD20 82-A3 CC × CD22 43-F7 CC × I2E × scFc | 33.5 |
| (Z7Q; 35181-1; RCi35181-1) | |
| CD20 82-E2 CC × CD22 43-F7 CC × I2E × scFc | 28.4 |
| CD20 82-A3 CC × CD22 44-A8 CC × I2E × scFc | 33.7 |
| CD20 82-G2 CC × CD22 44-A8 CC × I2E × scFc | 21.9 |
| CD20 82-A3 CC × CD22 16-G4 CC × I2E × scFc | 32.8 |
| CD20 82-A3 CC × CD22 17-F6 CC × I2E × scFc | 51.4 |
| CD20 82-A3 CC × CD22 53-D6 CC × I2E × scFc | 45.8 |
| CD20 82-G2 CC × CD22 53-D6 CC × I2E × scFc | 43.3 |
| CD20 82-A3 CC × CD22 53-G9 CC × I2E × scFc | 41.5 |
| CD20 82-D2 CC × CD22 53-G9 CC × I2E × scFc | 24.5 |
| CD20 82-A3 CC × CD22 97K-A8 CC × I2E × scFc | 47.2 |
| CD20 99-E5_CC × CD22 28-B7 N655 CC × I2C0 × | 10.8 |
| scFc (18595-1 G3P) | |

Peak slope of analyzed CD20-CD22-binding T cell engager molecules after injection on a HIC column

[0435] As it can be seen from table 5, a HIC eluation slope of above 15, typically above 25 can be observed for molecules according to the present invention. The higher slope stand for less hydrophobicity and, thus, for better producibility and stability.

### Evaluation of CD20 CD22 Dual Targeting Antigen-Binding Molecules In Vitro Affinity

[0436] Cell-based affinity of CD20 CD22 dual targeting antigen-binding molecules was determined by nonlinear regression (one site—specific binding) analysis. CHO cells expressing human CD20, cyno CD20, human CD22 or cyno CD22 were incubated with decreasing concentrations of CD20 CD22 dual targeting antigen-binding molecules (up to 800 nM, step 1:2 or 1:3, 11 steps) for 16 h at 4° C. Bound CD20 CD22 dual targeting antigen-binding molecules were detected with Alexa Fluor 488-conjugated AffiniPure Fab Fragment Goat Anti-Human IgG (H+L). Fixed cells were stained with DRAQ5, Far-Red Fluorescent Live-Cell Permeant DNA Dye and signals were detected by fluorescence cytometry. Respective equilibrium dissociation constant (Kd) values were calculated with the one site specific binding evaluation tool of the GraphPad Prism software. Mean Kd values and affinity gaps were calculated with Microsoft Excel.

TABLE 6
Cell-based affinities of CD20 CD22 dual targeting antigen-binding molecules

| | Cell based | Cell based | Affinity | Cell based | Cell based | Affinity |
|---|---|---|---|---|---|---|
| | affinity | affinity | gap | affinity | affinity | gap |
| | hu CD20 | cy CD20 | Kd_{cy}/Kdₕᵤ | hu CD22 | cy CD22 | Kd_{cy}/Kdₕᵤ |
| Molecule | [nM] | [nM] | CD20 | [nM] | [nM] | CD22 |
| Dual targeting antigen- | 49.66 ± 5.49 | 63.86 ± 10.64 | 1.29 | 0.19 ± 0.01 | 3.94 ± 0.83 | 20.99 |
| binding molecule 1 (G3P) | | | | | | |
| Dual targeting antigen- | 1.62 ± 0.47 | 1.26 ± 0.32 | 0.78 | 566.97 ± 82.56 | 1149.67 ± 309.58 | 2.03 |
| binding molecule 2 (P6B) | | | | | | |
| Dual targeting antigen- | 2.72 ± 1.89 | 1.74 ± 0.86 | 0.64 | 0.32 ± 0.12 | 2.46 ± 0.26 | 7.69 |
| binding molecule 3 (S5H) | | | | | | |
| Dual targeting antigen- | 1.39 ± 0.20 | 1.30 ± 0.30 | 0.94 | 0.36 ± 0.070 | 2.96 ± 0.77 | 8.22 |
| binding molecule 4 (O3S) | | | | | | |
| Dual targeting antigen- | 0.85 ± 0.18 | 1.04 ± 0.24 | 1.22 | 0.16 ± 0.035 | 2.75 ± 0.70 | 17.19 |
| binding molecule 5 (J1E) | | | | | | |
| Dual targeting antigen- | 2.63 ± 1.02 | 1.32 ± 0.24 | 0.50 | 0.12 ± 0.057 | 1.08 ± 0.30 | 9.00 |
| binding molecule 6 (L4L) | | | | | | |
| Dual targeting antigen- | 1.84 ± 0.60 | 1.70 ± 0.28 | 0.92 | 12.37 ± 3.71 | 2.85 ± 0.16 | 0.23 |
| binding molecule 7 (U2H) | | | | | | |
| Dual targeting antigen- | 2.21 ± 0.99 | 1.32 ± 0.14 | 0.60 | 0.22 ± 0.066 | 3.65 ± 1.51 | 16.59 |
| binding molecule 8 (W6V) | | | | | | |
| Dual targeting antigen- | 22.44 ± 5.85 | 11.12 ± 3.76 | 0.50 | 0.35 ± 0.16 | 0.58 ± 0.12 | 1.66 |
| binding molecule 10 (Z1W) | | | | | | |
| Dual targeting antigen- | 1.40 ± 0.30 | 2.08 ± 0.99 | 1.49 | 0.33 ± 0.14 | 3.39 ± 0.55 | 10.27 |
| binding molecule 11 (Z7Q) | | | | | | |
| Dual targeting antigen- | 31.93 ± 4.52 | 29.57 ± 2.69 | 0.93 | 0.22 ± 0.10 | 2.29 ± 0.45 | 10.41 |
| binding molecule 12 (F9P) | | | | | | |
| Dual targeting antigen- | 22.46 ± 5.28 | 25.90 ± 1.33 | 1.15 | 0.10 ± 0.036 | 1.42 ± 0.45 | 14.20 |
| binding molecule 13 (J9A) | | | | | | |
| Dual targeting antigen- | 4.69 ± 1.02 | 4.76 ± 2.14 | 1.01 | 0.25 ± 0.10 | 4.16 ± 0.43 | 16.64 |
| binding molecule 14 (M8E) | | | | | | |
| Dual targeting antigen- | 13.26 ± 2.32 | 15.81 ± 4.21 | 1.19 | 0.31 ± 0.064 | 1.82 ± 0.30 | 5.87 |
| binding molecule 15 (H1C) | | | | | | |

[0437] Cell-based affinities of CD20 CD22 dual targeting antigen-binding molecules on target-transfected CHO cells were determined by nonlinear regression (one site—specific binding) analysis. Mean Kd values were calculated from three independent measurements. Affinity gaps were determined by dividing the cyno Kd by the human Kd.

### Results

[0438] Cell-based affinity measurements revealed, that CD20 CD22 dual targeting antigen-binding molecules 2-16 have a higher cell-based affinity to human or cyno CD20 positive CHO cells and a smaller cyno/human gap on CD22 positive CHO cells in comparison to CD20 CD22 dual targeting antigen-binding molecule 1.

FACS Based Cytotoxicity Assay with Unstimulated Human PBMC

### Isolation of Effector Cells

[0439] Human peripheral blood mononuclear cells (PBMC) were prepared by Ficoll density gradient centrifugation from enriched lymphocyte preparations (buffy coats), a side product of blood banks collecting blood for transfusions. Buffy coats were supplied by a local blood bank and PBMC were prepared on the same day of blood collection. After Ficoll density centrifugation and extensive washes with Dulbecco's PBS (Gibco), remaining erythrocytes were removed from PBMC via incubation with erythrocyte lysis buffer (155 mM NH4Cl, 10 mM KHCO3, 100 μM EDTA). Platelets were removed via the supernatant upon centrifugation of PBMC at 100×g. Remaining lymphocytes mainly encompass B and T lymphocytes, NK cells and monocytes. PBMC were kept in culture at 37° C./5% CO2 in RPMI medium (Gibco) with 10% FCS (Gibco).

[0440] Depletion of CD14+, CD15+, CD16+, CD19+, CD34+, CD36+, CD56+, CD123+ and CD235a+ cells For depletion of CD14+, CD15+, CD16+, CD19+, CD34+, CD36+, CD56+, CD123+ and CD235a+ cells, the human Pan T cell isolation kit (Miltenyi Biotec, #130-096-535) were used. PBMC were counted and centrifuged for 10 min at room temperature with 300×g. The supernatant was discarded, and the cell pellet resuspended in MACS isolation buffer [80 μL/107 cells; PBS (Invitrogen, #20012-043), 0.5% (v/v) FBS (Gibco, #10270-106), 2 mM EDTA (Sigma-Aldrich, #E-6511)]. The human Pan T cell isolation kit (20 μL/107 cells) were added and incubated for 15 min at 4-8° C. The cells were washed with MACS isolation buffer (1-2 mL/107 cells). After centrifugation (see above), supernatant was discarded, and cells resuspended in MACS isolation buffer (500 μL/108 cells). CD14, CD15, CD16, CD19, CD34, CD36, CD56, CD123 and CD235a negative cells were then isolated using LS Columns (Miltenyi Biotec, #130-042-401). Pan T cells were cultured in RPMI complete medium i.e. RPMI1640 (Biochrom AG, #FG1215) supplemented with 10% FBS (Biochrom AG, #S0115), lx non-essential amino acids (Biochrom AG, #K0293), 10 mM Hepes buffer (Biochrom AG, #L1613), 1 mM sodium pyruvate (Biochrom AG, #L0473) and 100 U/mL penicillin/streptomycin (Biochrom AG, #A2213) at 37° C. in an incubator until needed.

### Target Cell Labeling

[0441] For the analysis of cell lysis in flow cytometry assays, the fluorescent membrane dye DiOC18 (DiO) (Molecular Probes, #V22886) was used to label the human CD20 and CD22 double positive human cell line Oci-Ly 1, the human CD20 single positive human cell line Oci-Ly 1 (CD22 knock out clone #A1) and the CD22 single positive human cell line Oci-Ly 1 (CD20 knock out clone #A5) as target cells and distinguish them from effector cells. Briefly, cells were harvested, washed once with PBS and adjusted to 106 cell/mL in PBS containing 2% (v/v) FBS and the membrane dye DiO (5 μL/106 cells). After incubation for 3 min at 37° C., cells were washed twice in complete RPMI medium and the cell number adjusted to 1.25×105 cells/mL. The vitality of cells was determined using the NC-250 cell counter (Chemometec)

### Flow Cytometry-Based Analysis

[0442] This assay was designed to quantify the lysis of Oci-Ly 1 cells in the presence of serial dilutions of CD20- and CD22 dual targeting antigen-binding molecules. Equal volumes of DiO-labeled target cells and effector cells (i.e., panT cells) were mixed, resulting in an E:T cell ratio of 10:1. 80 μl of this suspension were transferred to each well of a 96-well plate. 20 μL of serial dilutions of the CD20- and CD22 dual targeting antigen-binding molecules and a negative control (a CD3-based T cell engager molecule recognizing an irrelevant target antigen) or RPMI complete medium as an additional negative control were added. The dual targeting antigen-binding molecules cytotoxic reaction proceeded for 48 hours in a 7% CO2 humidified incubator. Then cells were transferred to a new 96-well plate and loss of target cell membrane integrity was monitored by adding propidium iodide (PI) at a final concentration of 1 μg/mL. PI is a membrane impermeable dye that normally is excluded from viable cells, whereas dead cells take it up and become identifiable by fluorescent emission.

[0443] Samples were measured by flow cytometry on an iQue Plus instrument and analyzed by Forecyt software (both from Intellicyt). Target cells were identified as DiO-positive cells. PI-negative target cells were classified as living target cells. Percentage of cytotoxicity was calculated according to the following formula.

$$Cytotoxicity [ \% ] = \frac{{n}_{dead target cells}}{{n}_{target cells}} \times 100$$

$$n = number of events$$

[0444] Using GraphPad Prism 5 software (Graph Pad Software, San Diego), the percentage of cytotoxicity was plotted against the corresponding CD20- and CD22 dual targeting antigen-binding molecules concentrations. Dose response curves were analyzed with the four parametric logistic regression models for evaluation of sigmoid dose response curves with fixed hill slope and EC50 values were calculated.

TABLE 7
48-hour FACS based cytotoxicity assay of CD20- and
CD22 dual targeting antigen-binding molecules

| | | Oci-Ly 1 | Oci-Ly 1 |
|---|---|---|---|
| | Oci-Ly 1 | CD22 k.o. | CD20 k.o. |
| Construct | EC50 [pM] | #A1 [pM] | #A5 [pM] |
| CD20 82-A3 CC × CD22 99-F10 | 0.14 | 0.12 | 40.12 |
| CC × I2E × scFc (P6B) | | | |
| CD20 82-D2 CC × CD22 43-A8 | 7.14 | 13.78 | 14.13 |
| CC × I2E × scFc (H1C) | | | |
| CD20 82-A3 CC × CD22 43-F7 | 2.04 | 0.23 | 10.97 |
| CC × I2E × scFc (Z7Q) | | | |
| CD20 82-E2 CC × CD22 43-F7 | 2.90 | 1.51 | 5.69 |
| CC × I2E × scFc (M8E) | | | |
| CD20 82-A3 CC × CD22 44-A8 | 4.48 | 0.22 | 5.50 |
| CC × I2E × scFc (J1E) | | | |
| CD20 82-G2 CC × CD22 44-A8 | 14.80 | 18.32 | 9.27 |
| CC × I2E × scFc (J9A) | | | |
| CD20 82-A3 CC × CD22 16-G4 | 1.38 | 3.45 | 5.31 |
| CC × I2E × scFc (S5H) | | | |
| CD20 82-A3 CC × CD22 17-F6 | 2.77 | 0.32 | 8.08 |
| CC × I2E × scFc (W6V) | | | |
| CD20 82-A3 CC × CD22 53-D6 | 4.12 | 0.27 | 6.79 |
| CC × I2E × scFc (O3S) | | | |
| CD20 82-G2 CC × CD22 53-D6 | 7.01 | 4.20 | 4.35 |
| CC × I2E × scFc (F9P) | | | |
| CD20 82-A3 CC × CD22 53-G9 | 0.66 | 0.03 | 5.27 |
| CC × I2E × scFc (L4L) | | | |
| CD20 82-D2 CC × CD22 53-G9 | 5.29 | 21.81 | 5.23 |
| CC × I2E × scFc (Z1W) | | | |
| CD20 82-A3 CC × CD22 97K-A8 | 3.75 | 0.35 | 77.18 |
| CC × I2E × scFc (U2H) | | | |
| CD20 99-E5 CC × CD22 28-B7 | 28.71 | 7.57 | 21.38 |
| N65S CC × I2C0 × scFc (G3P) | | | |

[0445] Table 7 shows 48-hour FACS-based cytotoxicity assay of CD20- and CD22 dual targeting antigen-binding molecules with human CD20 and CD22 double positive human cell line Oci-Ly 1, human CD20 single positive human cell line Oci-Ly 1 (CD22 knock out clone #A1) and CD22 single positive human cell line Oci-Ly 1 (CD20 knock out clone #A5) as target cells and panT as effector cells (E:T ratio 10:1). EC50 values are determined by the four parametric logistic regression models for evaluation of sigmoid dose response curves with fixed hill slope.

[0446] The cytotoxicity assay on human CD20 and CD22 double positive human Oci-Ly 1 cells revealed, that all binders show better bioactivity in a one- to two-digit pM range than binder CD20 99-E5 CC x CD22 28-B7 N65S CC x I2C0 x scFc (G3P).

TABLE 8
Sequence Table
The table below lists the sequences of whole antigen-binding molecules and
fragments and/or building blocks thereof. In the respective sequence de-
scription, I2C stands for a CD3 effector binding domain. I2E stands for a
CD3 effector binding domain with increased stability. HLE stands for a
half-life extending domain, typically a scFc domain. scFv stands for the
combination of a VH and a VL forming together a functional target or ef-
fector binding domain. Bispecific molecule stands for a combination of at
least one target binding and one effector binding domain forming together
a functional bispecific antigen-binding molecule. Targets are typically
abbreviated by two letters.

| SEQ | | | | |
|---|---|---|---|---|
| ID | | | | |
| NO: | Designation | Source | | Sequence |
| 1. | G4S linker | arti- | aa | GGGGS |
| | | ficial | | |
| 2. | (G4S)2 linker | arti- | aa | GGGGSGGGGS |
| | | ficial | | |
| 3. | (G4S)3 linker | arti- | aa | GGGGSGGGGSGGGGS |
| | | ficial | | |
| 4. | (G4S)4 linker | arti- | aa | GGGGSGGGGSGGGGSGGGGS |
| | | ficial | | |
| 5. | (G4S)5 linker | arti- | aa | GGGGSGGGGSGGGGSGGGGSGGGGS |
| | | ficial | | |
| 6. | (G4S)6 linker | arti- | aa | GGGGSGGGGSGGGGSGGGGSGGGGSGGGGS |
| | | ficial | | |
| 7. | (G4S)7 linker | arti- | aa | GGGGSGGGGSGGGGSGGGGSGGGGSGGGGSGGGGS |
| | | ficial | | |
| 8. | (G4S)8 linker | arti- | aa | GGGGSGGGGSGGGGSGGGGSGGGGSGGGGSGGGGSGGGGS |
| | | ficial | | |
| 9. | Peptide linker | arti- | aa | PGGGGS |
| | | ficial | | |
| 10. | Peptide linker | arti- | aa | PGGDGS |
| | | ficial | | |
| 11. | Peptide linker | arti- | aa | SGGGGS |
| | | ficial | | |
| 12. | Peptide linker | arti- | aa | GGGG |
| | | ficial | | |
| 13. | CD38 binder VL | arti- | aa | QTVVTQEPSLTVSPGGTVTLTCGSSTGAVTSGNYPNWVQQKPGQAPR |
| | | ficial | | GLIGGTKFLAPGTPARFSGSLLGGKAALTLSGVQPEDEAEYYCVLWYS |
| | | | | NRWVFGGGTKLTVL |
| 14. | CD38 binder VH | arti- | aa | EVQLVESGGGLVQPGGSLRLSCAASGFTFNSYAMNWVRQAPGKGLE |
| | | ficial | | WVARIRSKYNNYATYYADSVKGRFTISRDDSKNTAYLQMNSLKTEDT |
| | | | | AVYYCVRHGNFGNSYVSWWAYWGQGTLVTVSS |
| 15. | CD38 binder | arti- | aa | EVQLVESGGGLVQPGGSLRLSCAASGFTFNSYAMNWVRQAPGKGLE |
| | scFv | ficial | | WVARIRSKYNNYATYYADSVKGRFTISRDDSKNTAYLQMNSLKTEDT |
| | | | | AVYYCVRHGNFGNSYVSWWAYWGQGTLVTVSSGGGGSGGGGSGGG |
| | | | | GSQTVVTQEPSLTVSPGGTVTLTCGSSTGAVTSGNYPNWVQQKPGQAP |
| | | | | RGLIGGTKFLAPGTPARFSGSLLGGKAALTLSGVQPEDEAEYYCVLWY |
| | | | | SNRWVFGGGTKLTVL |
| 16. | hexa-histidine | arti- | aa | HHHHHH |
| | tag | ficial | | |
| 17. | Fc monomer-1 | arti- | aa | DKTHTCPPCPAPELLGGPSVFLFPPKPKDTLMISRTPEVTCVVVDVSHE |
| | +c/−g | ficial | | DPEVKFNWYVDGVEVHNAKTKPCEEQYGSTYRCVSVLTVLHQDWLN |
| | | | | GKEYKCKVSNKALPAPIEKTISKAKGQPREPQVYTLPPSREEMTKNQVS |
| | | | | LTCLVKGFYPSDIAVEWESNGQPENNYKTTPPVLDSDGSFFLYSKLTVD |
| | | | | KSRWQQGNVFSCSVMHEALHNHYTQKSLSLSPGK |
| 18. | Fc monomer-2 | arti- | aa | DKTHTCPPCPAPELLGGPSVFLFPPKPKDTLMISRTPEVTCVVVDVSHE |
| | +c/−g/delGK | ficial | | DPEVKFNWYVDGVEVHNAKTKPCEEQYGSTYRCVSVLTVLHQDWLN |
| | | | | GKEYKCKVSNKALPAPIEKTISKAKGQPREPQVYTLPPSREEMTKNQVS |
| | | | | LTCLVKGFYPSDIAVEWESNGQPENNYKTTPPVLDSDGSFFLYSKLTVD |
| | | | | KSRWQQGNVFSCSVMHEALHNHYTQKSLSLSP |
| 19. | Fc monomer-3 | arti- | aa | DKTHTCPPCPAPELLGGPSVFLFPPKPKDTLMISRTPEVTCVVVDVSHE |
| | −c/+g | ficial | | DPEVKFNWYVDGVEVHNAKTKPREEQYNSTYRVVSVLTVLHQDWLN |
| | | | | GKEYKCKVSNKALPAPIEKTISKAKGQPREPQVYTLPPSREEMTKNQVS |
| | | | | LTCLVKGFYPSDIAVEWESNGQPENNYKTTPPVLDSDGSFFLYSKLTVD |
| | | | | KSRWQQGNVFSCSVMHEALHNHYTQKSLSLSPGK |
| 20. | Fc monomer-4 | arti- | aa | DKTHTCPPCPAPELLGGPSVFLFPPKPKDTLMISRTPEVTCVVVDVSHE |
| | −c/+g/delGK | ficial | | DPEVKFNWYVDGVEVHNAKTKPREEQYNSTYRVVSVLTVLHQDWLN |
| | | | | GKEYKCKVSNKALPAPIEKTISKAKGQPREPQVYTLPPSREEMTKNQVS |
| | | | | LTCLVKGFYPSDIAVEWESNGQPENNYKTTPPVLDSDGSFFLYSKLTVD |
| | | | | KSRWQQGNVFSCSVMHEALHNHYTQKSLSLSP |
| 21. | Fc monomer-5 | arti- | aa | DKTHTCPPCPAPELLGGPSVFLFPPKPKDTLMISRTPEVTCVVVDVSHE |
| | −c/−g | ficial | | DPEVKFNWYVDGVEVHNAKTKPREEQYGSTYRVVSVLTVLHQDWLN |
| | | | | GKEYKCKVSNKALPAPIEKTISKAKGQPREPQVYTLPPSREEMTKNQVS |
| | | | | LTCLVKGFYPSDIAVEWESNGQPENNYKTTPPVLDSDGSFFLYSKLTVD |
| | | | | KSRWQQGNVFSCSVMHEALHNHYTQKSLSLSPGK |
| 22. | Fc monomer-6 | arti- | aa | DKTHTCPPCPAPELLGGPSVFLFPPKPKDTLMISRTPEVTCVVVDVSHE |
| | −c/−g/delGK | ficial | | DPEVKFNWYVDGVEVHNAKTKPREEQYGSTYRVVSVLTVLHQDWLN |
| | | | | GKEYKCKVSNKALPAPIEKTISKAKGQPREPQVYTLPPSREEMTKNQVS |
| | | | | LTCLVKGFYPSDIAVEWESNGQPENNYKTTPPVLDSDGSFFLYSKLTVD |
| | | | | KSRWQQGNVFSCSVMHEALHNHYTQKSLSLSP |
| 23. | Fc monomer-7 | arti- | aa | DKTHTCPPCPAPELLGGPSVFLFPPKPKDTLMISRTPEVTCVVVDVSHE |
| | +c/+g | ficial | | DPEVKFNWYVDGVEVHNAKTKPCEEQYNSTYRCVSVLTVLHQDWLN |
| | | | | GKEYKCKVSNKALPAPIEKTISKAKGQPREPQVYTLPPSREEMTKNQVS |
| | | | | LTCLVKGFYPSDIAVEWESNGQPENNYKTTPPVLDSDGSFFLYSKLTVD |
| | | | | KSRWQQGNVFSCSVMHEALHNHYTQKSLSLSPGK |
| 24. | Fc monomer-8 | arti- | aa | DKTHTCPPCPAPELLGGPSVFLFPPKPKDTLMISRTPEVTCVVVDVSHE |
| | +c/+g/delGK | ficial | | DPEVKFNWYVDGVEVHNAKTKPCEEQYNSTYRCVSVLTVLHQDWLN |
| | | | | GKEYKCKVSNKALPAPIEKTISKAKGQPREPQVYTLPPSREEMTKNQVS |
| | | | | LTCLVKGFYPSDIAVEWESNGQPENNYKTTPPVLDSDGSFFLYSKLTVD |
| | | | | KSRWQQGNVFSCSVMHEALHNHYTQKSLSLSP |
| 25. | scFc-1 | arti- | aa | DKTHTCPPCPAPELLGGPSVFLFPPKPKDTLMISRTPEVTCVVVDVSHE |
| | | ficial | | DPEVKFNWYVDGVEVHNAKTKPCEEQYGSTYRCVSVLTVLHQDWLN |
| | | | | GKEYKCKVSNKALPAPIEKTISKAKGQPREPQVYTLPPSREEMTKNQVS |
| | | | | LTCLVKGFYPSDIAVEWESNGQPENNYKTTPPVLDSDGSFFLYSKLTVD |
| | | | | KSRWQQGNVFSCSVMHEALHNHYTQKSLSLSPGKGGGGSGGGGSGG |
| | | | | GGSGGGGSGGGGSGGGGSDKTHTCPPCPAPELLGGPSVFLFPPKPKDT |
| | | | | LMISRTPEVTCVVVDVSHEDPEVKFNWYVDGVEVHNAKTKPCEEQYG |
| | | | | STYRCVSVLTVLHQDWLNGKEYKCKVSNKALPAPIEKTISKAKGQPRE |
| | | | | PQVYTLPPSREEMTKNQVSLTCLVKGFYPSDIAVEWESNGQPENNYKT |
| | | | | TPPVLDSDGSFFLYSKLTVDKSRWQQGNVFSCSVMHEALHNHYTQKS |
| | | | | LSLSPGK |
| 26. | scFc-2 | arti- | aa | DKTHTCPPCPAPELLGGPSVFLFPPKPKDTLMISRTPEVTCVVVDVSHE |
| | | ficial | | DPEVKFNWYVDGVEVHNAKTKPCEEQYGSTYRCVSVLTVLHQDWLN |
| | | | | GKEYKCKVSNKALPAPIEKTISKAKGQPREPQVYTLPPSREEMTKNQVS |
| | | | | LTCLVKGFYPSDIAVEWESNGQPENNYKTTPPVLDSDGSFFLYSKLTVD |
| | | | | KSRWQQGNVFSCSVMHEALHNHYTQKSLSLSPGGGGSGGGGSGGGGS |
| | | | | GGGGSGGGGSGGGGSDKTHTCPPCPAPELLGGPSVFLFPPKPKDTLMIS |
| | | | | RTPEVTCVVVDVSHEDPEVKFNWYVDGVEVHNAKTKPCEEQYGSTYR |
| | | | | CVSVLTVLHQDWLNGKEYKCKVSNKALPAPIEKTISKAKGQPREPQVY |
| | | | | TLPPSREEMTKNQVSLTCLVKGFYPSDIAVEWESNGQPENNYKTTPPV |
| | | | | LDSDGSFFLYSKLTVDKSRWQQGNVFSCSVMHEALHNHYTQKSLSLSP |
| 27. | scFc-3 | arti- | aa | DKTHTCPPCPAPELLGGPSVFLFPPKPKDTLMISRTPEVTCVVVDVSHE |
| | | ficial | | DPEVKFNWYVDGVEVHNAKTKPREEQYNSTYRVVSVLTVLHQDWLN |
| | | | | GKEYKCKVSNKALPAPIEKTISKAKGQPREPQVYTLPPSREEMTKNQVS |
| | | | | LTCLVKGFYPSDIAVEWESNGQPENNYKTTPPVLDSDGSFFLYSKLTVD |
| | | | | KSRWQQGNVFSCSVMHEALHNHYTQKSLSLSPGKGGGGSGGGGSGG |
| | | | | GGSGGGGSGGGGSGGGGSDKTHTCPPCPAPELLGGPSVFLFPPKPKDT |
| | | | | LMISRTPEVTCVVVDVSHEDPEVKFNWYVDGVEVHNAKTKPREEQYN |
| | | | | STYRVVSVLTVLHQDWLNGKEYKCKVSNKALPAPIEKTISKAKGQPRE |
| | | | | PQVYTLPPSREEMTKNQVSLTCLVKGFYPSDIAVEWESNGQPENNYKT |
| | | | | TPPVLDSDGSFFLYSKLTVDKSRWQQGNVFSCSVMHEALHNHYTQKS |
| | | | | LSLSPGK |
| 28. | scFc-4 | arti- | aa | DKTHTCPPCPAPELLGGPSVFLFPPKPKDTLMISRTPEVTCVVVDVSHE |
| | | ficial | | DPEVKFNWYVDGVEVHNAKTKPREEQYNSTYRVVSVLTVLHQDWLN |
| | | | | GKEYKCKVSNKALPAPIEKTISKAKGQPREPQVYTLPPSREEMTKNQVS |
| | | | | LTCLVKGFYPSDIAVEWESNGQPENNYKTTPPVLDSDGSFFLYSKLTVD |
| | | | | KSRWQQGNVFSCSVMHEALHNHYTQKSLSLSPGGGGSGGGGSGGGGS |
| | | | | GGGGSGGGGSGGGGSDKTHTCPPCPAPELLGGPSVFLFPPKPKDTLMIS |
| | | | | RTPEVTCVVVDVSHEDPEVKFNWYVDGVEVHNAKTKPREEQYNSTYR |
| | | | | VVSVLTVLHQDWLNGKEYKCKVSNKALPAPIEKTISKAKGQPREPQVY |
| | | | | TLPPSREEMTKNQVSLTCLVKGFYPSDIAVEWESNGQPENNYKTTPPV |
| | | | | LDSDGSFFLYSKLTVDKSRWQQGNVFSCSVMHEALHNHYTQKSLSLSP |
| 29. | scFc-5 | arti- | aa | DKTHTCPPCPAPELLGGPSVFLFPPKPKDTLMISRTPEVTCVVVDVSHE |
| | | ficial | | DPEVKFNWYVDGVEVHNAKTKPREEQYGSTYRVVSVLTVLHQDWLN |
| | | | | GKEYKCKVSNKALPAPIEKTISKAKGQPREPQVYTLPPSREEMTKNQVS |
| | | | | LTCLVKGFYPSDIAVEWESNGQPENNYKTTPPVLDSDGSFFLYSKLTVD |
| | | | | KSRWQQGNVFSCSVMHEALHNHYTQKSLSLSPGKGGGGSGGGGSGG |
| | | | | GGSGGGGSGGGGSGGGGSDKTHTCPPCPAPELLGGPSVFLFPPKPKDT |
| | | | | LMISRTPEVTCVVVDVSHEDPEVKFNWYVDGVEVHNAKTKPREEQYG |
| | | | | STYRVVSVLTVLHQDWLNGKEYKCKVSNKALPAPIEKTISKAKGQPRE |
| | | | | PQVYTLPPSREEMTKNQVSLTCLVKGFYPSDIAVEWESNGQPENNYKT |
| | | | | TPPVLDSDGSFFLYSKLTVDKSRWQQGNVFSCSVMHEALHNHYTQKS |
| | | | | LSLSPGK |
| 30. | scFc-6 | arti- | aa | DKTHTCPPCPAPELLGGPSVFLFPPKPKDTLMISRTPEVTCVVVDVSHE |
| | | ficial | | DPEVKFNWYVDGVEVHNAKTKPREEQYGSTYRVVSVLTVLHQDWLN |
| | | | | GKEYKCKVSNKALPAPIEKTISKAKGQPREPQVYTLPPSREEMTKNQVS |
| | | | | LTCLVKGFYPSDIAVEWESNGQPENNYKTTPPVLDSDGSFFLYSKLTVD |
| | | | | KSRWQQGNVFSCSVMHEALHNHYTQKSLSLSPGGGGSGGGGSGGGGS |
| | | | | GGGGSGGGGSGGGGSDKTHTCPPCPAPELLGGPSVFLFPPKPKDTLMIS |
| | | | | RTPEVTCVVVDVSHEDPEVKFNWYVDGVEVHNAKTKPREEQYGSTYR |
| | | | | VVSVLTVLHQDWLNGKEYKCKVSNKALPAPIEKTISKAKGQPREPQVY |
| | | | | TLPPSREEMTKNQVSLTCLVKGFYPSDIAVEWESNGQPENNYKTTPPV |
| | | | | LDSDGSFFLYSKLTVDKSRWQQGNVFSCSVMHEALHNHYTQKSLSLSP |
| 31. | scFc-7 | arti- | aa | DKTHTCPPCPAPELLGGPSVFLFPPKPKDTLMISRTPEVTCVVVDVSHE |
| | | ficial | | DPEVKFNWYVDGVEVHNAKTKPCEEQYNSTYRCVSVLTVLHQDWLN |
| | | | | GKEYKCKVSNKALPAPIEKTISKAKGQPREPQVYTLPPSREEMTKNQVS |
| | | | | LTCLVKGFYPSDIAVEWESNGQPENNYKTTPPVLDSDGSFFLYSKLTVD |
| | | | | KSRWQQGNVFSCSVMHEALHNHYTQKSLSLSPGKGGGGSGGGGSGG |
| | | | | GGSGGGGSGGGGSGGGGSDKTHTCPPCPAPELLGGPSVFLFPPKPKDT |
| | | | | LMISRTPEVTCVVVDVSHEDPEVKFNWYVDGVEVHNAKTKPCEEQYN |
| | | | | STYRCVSVLTVLHQDWLNGKEYKCKVSNKALPAPIEKTISKAKGQPRE |
| | | | | PQVYTLPPSREEMTKNQVSLTCLVKGFYPSDIAVEWESNGQPENNYKT |
| | | | | TPPVLDSDGSFFLYSKLTVDKSRWQQGNVFSCSVMHEALHNHYTQKS |
| | | | | LSLSPGK |
| 32. | scFc-8 | arti- | aa | DKTHTCPPCPAPELLGGPSVFLFPPKPKDTLMISRTPEVTCVVVDVSHE |
| | | ficial | | DPEVKFNWYVDGVEVHNAKTKPCEEQYNSTYRCVSVLTVLHQDWLN |
| | | | | GKEYKCKVSNKALPAPIEKTISKAKGQPREPQVYTLPPSREEMTKNQVS |
| | | | | LTCLVKGFYPSDIAVEWESNGQPENNYKTTPPVLDSDGSFFLYSKLTVD |
| | | | | KSRWQQGNVFSCSVMHEALHNHYTQKSLSLSPGGGGSGGGGSGGGGS |
| | | | | GGGGSGGGGSGGGGSDKTHTCPPCPAPELLGGPSVFLFPPKPKDTLMIS |
| | | | | RTPEVTCVVVDVSHEDPEVKFNWYVDGVEVHNAKTKPCEEQYNSTYR |
| | | | | CVSVLTVLHQDWLNGKEYKCKVSNKALPAPIEKTISKAKGQPREPQVY |
| | | | | TLPPSREEMTKNQVSLTCLVKGFYPSDIAVEWESNGQPENNYKTTPPV |
| | | | | LDSDGSFFLYSKLTVDKSRWQQGNVFSCSVMHEALHNHYTQKSLSLSP |
| 33. | CD22_28- | arti- | aa | SYGIS |
| | B7_N655_CC | ficial | | |
| | HCDR1 | | | |
| 34. | HCDR2 | arti- | aa | WISAYSGNAIYAQKLQG |
| | | ficial | | |
| 35. | HCDR3 | arti- | aa | DPDYYGSGSYSDY |
| | | ficial | | |
| 36. | LCDR1 | arti- | aa | RASQSVSSNLA |
| | | ficial | | |
| 37. | LCDR2 | arti- | aa | GASSRAT |
| | | ficial | | |
| 38. | LCDR3 | arti- | aa | QQYHSWPLLT |
| | | ficial | | |
| 39. | VH | arti- | aa | QVQLVQSGAEVKKPGASVKVSCKASGYTFTSYGISWVRQAPGQCLEW |
| | | ficial | | MGWISAYSGNAIYAQKLQGRVTMTRDTSTSTAYMELRSLRSDDTAVY |
| | | | | YCARDPDYYGSGSYSDYWGQGTLVTVSS |
| 40. | VL | arti- | aa | EIVLTQSPATLSVSPGERATLSCRASQSVSSNLAWYQQKPGQAPRLLIY |
| | | ficial | | GASSRATGIPARFSGSGSGTEFTLTISSLQSEDFAVYYCQQYHSWPLLTF |
| | | | | GCGTKVEIK |
| 41. | SCFV | arti- | aa | QVQLVQSGAEVKKPGASVKVSCKASGYTFTSYGISWVRQAPGQCLEW |
| | | ficial | | MGWISAYSGNAIYAQKLQGRVTMTRDTSTSTAYMELRSLRSDDTAVY |
| | | | | YCARDPDYYGSGSYSDYWGQGTLVTVSSGGGGSGGGGSGGGGSEIVL |
| | | | | TQSPATLSVSPGERATLSCRASQSVSSNLAWYQQKPGQAPRLLIYGASS |
| | | | | RATGIPARFSGSGSGTEFTLTISSLQSEDFAVYYCQQYHSWPLLTFGCGT |
| | | | | KVEIK |
| 42. | BISPECIFIC | arti- | aa | QVQLVQSGAEVKKPGASVKVSCKASGYTFTSYGISWVRQAPGQCLEW |
| | MOL. | ficial | | MGWISAYSGNAIYAQKLQGRVTMTRDTSTSTAYMELRSLRSDDTAVY |
| | | | | YCARDPDYYGSGSYSDYWGQGTLVTVSSGGGGSGGGGSGGGGSEIVL |
| | | | | TQSPATLSVSPGERATLSCRASQSVSSNLAWYQQKPGQAPRLLIYGASS |
| | | | | RATGIPARFSGSGSGTEFTLTISSLQSEDFAVYYCQQYHSWPLLTFGCGT |
| | | | | KVEIKSGGGGSEVQLVESGGGLVQPGGSLKLSCAASGFTFNKYAMNW |
| | | | | VRQAPGKGLEWVARIRSKYNNYATYYADSVKDRFTISRDDSKNTAYL |
| | | | | QMNNLKTEDTAVYYCVRHGNFGNSYISYWAYWGQGTLVTVSSGGGG |
| | | | | SGGGGSGGGGSQTVVTQEPSLTVSPGGTVTLTCGSSTGAVTSGNYPNW |
| | | | | VQQKPGQAPRGLIGGTKFLAPGTPARFSGSLLGGKAALTLSGVQPEDE |
| | | | | AEYYCVLWYSNRWVFGGGTKLTVL |
| 43. | BiTE HLE | arti- | aa | QVQLVQSGAEVKKPGASVKVSCKASGYTFTSYGISWVRQAPGQCLEW |
| | | ficial | | MGWISAYSGNAIYAQKLQGRVTMTRDTSTSTAYMELRSLRSDDTAVY |
| | | | | YCARDPDYYGSGSYSDYWGQGTLVTVSSGGGGSGGGGSGGGGSEIVL |
| | | | | TQSPATLSVSPGERATLSCRASQSVSSNLAWYQQKPGQAPRLLIYGASS |
| | | | | RATGIPARFSGSGSGTEFTLTISSLQSEDFAVYYCQQYHSWPLLTFGCGT |
| | | | | KVEIKSGGGGSEVQLVESGGGLVQPGGSLKLSCAASGFTFNKYAMNW |
| | | | | VRQAPGKGLEWVARIRSKYNNYATYYADSVKDRFTISRDDSKNTAYL |
| | | | | QMNNLKTEDTAVYYCVRHGNFGNSYISYWAYWGQGTLVTVSSGGGG |
| | | | | SGGGGSGGGGSQTVVTQEPSLTVSPGGTVTLTCGSSTGAVTSGNYPNW |
| | | | | VQQKPGQAPRGLIGGTKFLAPGTPARFSGSLLGGKAALTLSGVQPEDE |
| | | | | AEYYCVLWYSNRWVFGGGTKLTVLGGGGDKTHTCPPCPAPELLGGPS |
| | | | | VFLFPPKPKDTLMISRTPEVTCVVVDVSHEDPEVKFNWYVDGVEVHN |
| | | | | AKTKPCEEQYGSTYRCVSVLTVLHQDWLNGKEYKCKVSNKALPAPIE |
| | | | | KTISKAKGQPREPQVYTLPPSREEMTKNQVSLTCLVKGFYPSDIAVEWE |
| | | | | SNGQPENNYKTTPPVLDSDGSFFLYSKLTVDKSRWQQGNVFSCSVMH |
| | | | | EALHNHYTQKSLSLSPGKGGGGSGGGGSGGGGSGGGGSGGGGSGGG |
| | | | | GSDKTHTCPPCPAPELLGGPSVFLFPPKPKDTLMISRTPEVTCVVVDVS |
| | | | | HEDPEVKFNWYVDGVEVHNAKTKPCEEQYGSTYRCVSVLTVLHQDW |
| | | | | LNGKEYKCKVSNKALPAPIEKTISKAKGQPREPQVYTLPPSREEMTKN |
| | | | | QVSLTCLVKGFYPSDIAVEWESNGQPENNYKTTPPVLDSDGSFFLYSKL |
| | | | | TVDKSRWQQGNVFSCSVMHEALHNHYTQKSLSLSPGK |
| 44. | CD20_99-E5_CC | arti- | aa | SYWMH |
| | HCDR1 | ficial | | |
| 45. | HCDR2 | arti- | aa | YITPSTGYTEYNQKFKG |
| | | ficial | | |
| 46. | HCDR3 | arti- | aa | VHDYDRAMEY |
| | | ficial | | |
| 47. | LCDR1 | arti- | aa | KASQDINKYIA |
| | | ficial | | |
| 48. | LCDR2 | arti- | aa | YTSTLQP |
| | | ficial | | |
| 49. | LCDR3 | arti- | aa | LQYASYPFT |
| | | ficial | | |
| 50. | VH | arti- | aa | QVQLVQSGAEVKKPGASVKVSCKASGYTFTSYWMHWVRQAPGQCLE |
| | | ficial | | WIGYITPSTGYTEYNQKFKGRVTMTRDKSTSTVYMELSSLTSEDTAVY |
| | | | | YCARVHDYDRAMEYWGQGTTVTVSS |
| 51. | VL | arti- | aa | DIQMTQSPSSLSASVGDRVTITCKASQDINKYIAWYQQKPGKGPKLLIY |
| | | ficial | | YTSTLQPGVPSRFSGSGSGTDFTFTISSLQPEDIATYYCLQYASYPFTFGC |
| | | | | GTRLEIK |
| 52. | SCFV | arti- | aa | QVQLVQSGAEVKKPGASVKVSCKASGYTFTSYWMHWVRQAPGQCLE |
| | | ficial | | WIGYITPSTGYTEYNQKFKGRVTMTRDKSTSTVYMELSSLTSEDTAVY |
| | | | | YCARVHDYDRAMEYWGQGTTVTVSSGGGGSGGGGSGGGGSDIQMTQ |
| | | | | SPSSLSASVGDRVTITCKASQDINKYIAWYQQKPGKGPKLLIYYTSTLQ |
| | | | | PGVPSRFSGSGSGTDFTFTISSLQPEDIATYYCLQYASYPFTFGCGTRLEI |
| | | | | K |
| 53. | BISPECIFIC | arti- | aa | QVQLVQSGAEVKKPGASVKVSCKASGYTFTSYWMHWVRQAPGQCLE |
| | MOL. | ficial | | WIGYITPSTGYTEYNQKFKGRVTMTRDKSTSTVYMELSSLTSEDTAVY |
| | | | | YCARVHDYDRAMEYWGQGTTVTVSSGGGGGGGGSGGGGSDIQMTQ |
| | | | | SPSSLSASVGDRVTITCKASQDINKYIAWYQQKPGKGPKLLIYYTSTLQ |
| | | | | PGVPSRFSGSGSGTDFTFTISSLQPEDIATYYCLQYASYPFTFGCGTRLEI |
| | | | | KSGGGGSEVQLVESGGGLVQPGGSLKLSCAASGFTFNKYAMNWVRQ |
| | | | | APGKGLEWVARIRSKYNNYATYYADSVKDRFTISRDDSKNTAYLQMN |
| | | | | NLKTEDTAVYYCVRHGNFGNSYISYWAYWGQGTLVTVSSGGGGSGG |
| | | | | GGSGGGGSQTVVTQEPSLTVSPGGTVTLTCGSSTGAVTSGNYPNWVQ |
| | | | | QKPGQAPRGLIGGTKFLAPGTPARFSGSLLGGKAALTLSGVQPEDEAE |
| | | | | YYCVLWYSNRWVFGGGTKLTVL |
| 54. | BiTE HLE | arti- | aa | QVQLVQSGAEVKKPGASVKVSCKASGYTFTSYWMHWVRQAPGQCLE |
| | | ficial | | WIGYITPSTGYTEYNQKFKGRVTMTRDKSTSTVYMELSSLTSEDTAVY |
| | | | | YCARVHDYDRAMEYWGQGTTVTVSSGGGGSGGGGSGGGGSDIQMTQ |
| | | | | SPSSLSASVGDRVTITCKASQDINKYIAWYQQKPGKGPKLLIYYTSTLQ |
| | | | | PGVPSRFSGSGSGTDFTFTISSLQPEDIATYYCLQYASYPFTFGCGTRLEI |
| | | | | KSGGGGSEVQLVESGGGLVQPGGSLKLSCAASGFTFNKYAMNWVRQ |
| | | | | APGKGLEWVARIRSKYNNYATYYADSVKDRFTISRDDSKNTAYLQMN |
| | | | | NLKTEDTAVYYCVRHGNFGNSYISYWAYWGQGTLVTVSSGGGGSGG |
| | | | | GGSGGGGSQTVVTQEPSLTVSPGGTVTLTCGSSTGAVTSGNYPNWVQ |
| | | | | QKPGQAPRGLIGGTKFLAPGTPARFSGSLLGGKAALTLSGVQPEDEAE |
| | | | | YYCVLWYSNRWVFGGGTKLTVLGGGGDKTHTCPPCPAPELLGGPSVF |
| | | | | LFPPKPKDTLMISRTPEVTCVVVDVSHEDPEVKFNWYVDGVEVHNAK |
| | | | | TKPCEEQYGSTYRCVSVLTVLHQDWLNGKEYKCKVSNKALPAPIEKTI |
| | | | | SKAKGQPREPQVYTLPPSREEMTKNQVSLTCLVKGFYPSDIAVEWESN |
| | | | | GQPENNYKTTPPVLDSDGSFFLYSKLTVDKSRWQQGNVFSCSVMHEA |
| | | | | LHNHYTQKSLSLSPGKGGGGSGGGGSGGGGSGGGGSGGGGSGGGGSD |
| | | | | KTHTCPPCPAPELLGGPSVFLFPPKPKDTLMISRTPEVTCVVVDVSHEDP |
| | | | | EVKFNWYVDGVEVHNAKTKPCEEQYGSTYRCVSVLTVLHQDWLNGK |
| | | | | EYKCKVSNKALPAPIEKTISKAKGQPREPQVYTLPPSREEMTKNQVSLT |
| | | | | CLVKGFYPSDIAVEWESNGQPENNYKTTPPVLDSDGSFFLYSKLTVDK |
| | | | | SRWQQGNVFSCSVMHEALHNHYTQKSLSLSPGK |
| 55. | CD20_99- | arti- | aa | QVQLVQSGAEVKKPGASVKVSCKASGYTFTSYWMHWVRQAPGQCLE |
| | E5_CC_x_CD22_ | ficial | | WIGYITPSTGYTEYNQKFKGRVTMTRDKSTSTVYMELSSLTSEDTAVY |
| | 28-B7_N655_CC | | | YCARVHDYDRAMEYWGQGTTVTVSSGGGGSGGGGSGGGGSDIQMTQ |
| | | | | SPSSLSASVGDRVTITCKASQDINKYIAWYQQKPGKGPKLLIYYTSTLQ |
| | | | | PGVPSRFSGSGSGTDFTFTISSLQPEDIATYYCLQYASYPFTFGCGTRLEI |
| | | | | KSGGGGSQVQLVQSGAEVKKPGASVKVSCKASGYTFTSYGISWVRQA |
| | | | | PGQCLEWMGWISAYSGNAIYAQKLQGRVTMTRDTSTSTAYMELRSLR |
| | | | | SDDTAVYYCARDPDYYGSGSYSDYWGQGTLVTVSSGGGGSGGGGSG |
| | | | | GGGSEIVLTQSPATLSVSPGERATLSCRASQSVSSNLAWYQQKPGQAPR |
| | | | | LLIYGASSRATGIPARFSGSGSGTEFTLTISSLQSEDFAVYYCQQYHSWP |
| | | | | LLTFGCGTKVEIK |
| 56. | CD20_99- | arti- | aa | QVQLVQSGAEVKKPGASVKVSCKASGYTFTSYWMHWVRQAPGQCLE |
| | E5_CC_x_CD22_ | ficial | | WIGYITPSTGYTEYNQKFKGRVTMTRDKSTSTVYMELSSLTSEDTAVY |
| | 28- | | | YCARVHDYDRAMEYWGQGTTVTVSSGGGGSGGGGSGGGGSDIQMTQ |
| | B7_N655_CC_x_I | | | SPSSLSASVGDRVTITCKASQDINKYIAWYQQKPGKGPKLLIYYTSTLQ |
| | 2C0 | | | PGVPSRFSGSGSGTDFTFTISSLQPEDIATYYCLQYASYPFTFGCGTRLEI |
| | | | | KSGGGGSQVQLVQSGAEVKKPGASVKVSCKASGYTFTSYGISWVRQA |
| | | | | PGQCLEWMGWISAYSGNAIYAQKLQGRVTMTRDTSTSTAYMELRSLR |
| | | | | SDDTAVYYCARDPDYYGSGSYSDYWGQGTLVTVSSGGGGSGGGGSG |
| | | | | GGGSEIVLTQSPATLSVSPGERATLSCRASQSVSSNLAWYQQKPGQAPR |
| | | | | LLIYGASSRATGIPARFSGSGSGTEFTLTISSLQSEDFAVYYCQQYHSWP |
| | | | | LLTFGCGTKVEIKSGGGGSEVQLVESGGGLVQPGGSLKLSCAASGFTF |
| | | | | NKYAMNWVRQAPGKGLEWVARIRSKYNNYATYYADSVKDRFTISRD |
| | | | | DSKNTAYLQMNNLKTEDTAVYYCVRHGNFGNSYISYWAYWGQGTLV |
| | | | | TVSSGGGGSGGGGSGGGGSQTVVTQEPSLTVSPGGTVTLTCGSSTGAV |
| | | | | TSGNYPNWVQQKPGQAPRGLIGGTKFLAPGTPARFSGSLLGGKAALTL |
| | | | | SGVQPEDEAEYYCVLWYSNRWVFGGGTKLTVL |
| 57. | CD20_99- | arti- | aa | QVQLVQSGAEVKKPGASVKVSCKASGYTFTSYWMHWVRQAPGQCLE |
| | E5_CC_x_CD22_ | ficial | | WIGYITPSTGYTEYNQKFKGRVTMTRDKSTSTVYMELSSLTSEDTAVY |
| | 28- | | | YCARVHDYDRAMEYWGQGTTVTVSSGGGGSGGGGSGGGGSDIQMTQ |
| | B7_N655_CC_x_I | | | SPSSLSASVGDRVTITCKASQDINKYIAWYQQKPGKGPKLLIYYTSTLQ |
| | 2C0_x_scFc | | | PGVPSRFSGSGSGTDFTFTISSLQPEDIATYYCLQYASYPFTFGCGTRLEI |
| | | | | KSGGGGSQVQLVQSGAEVKKPGASVKVSCKASGYTFTSYGISWVRQA |
| | | | | PGQCLEWMGWISAYSGNAIYAQKLQGRVTMTRDTSTSTAYMELRSLR |
| | | | | SDDTAVYYCARDPDYYGSGSYSDYWGQGTLVTVSSGGGGSGGGGSG |
| | | | | GGGSEIVLTQSPATLSVSPGERATLSCRASQSVSSNLAWYQQKPGQAPR |
| | | | | LLIYGASSRATGIPARFSGSGSGTEFTLTISSLQSEDFAVYYCQQYHSWP |
| | | | | LLTFGCGTKVEIKSGGGGSEVQLVESGGGLVQPGGSLKLSCAASGFTF |
| | | | | NKYAMNWVRQAPGKGLEWVARIRSKYNNYATYYADSVKDRFTISRD |
| | | | | DSKNTAYLQMNNLKTEDTAVYYCVRHGNFGNSYISYWAYWGQGTLV |
| | | | | TVSSGGGGSGGGGSGGGGSQTVVTQEPSLTVSPGGTVTLTCGSSTGAV |
| | | | | TSGNYPNWVQQKPGQAPRGLIGGTKFLAPGTPARFSGSLLGGKAALTL |
| | | | | SGVQPEDEAEYYCVLWYSNRWVFGGGTKLTVLGGGGDKTHTCPPCP |
| | | | | APELLGGPSVFLFPPKPKDTLMISRTPEVTCVVVDVSHEDPEVKFNWY |
| | | | | VDGVEVHNAKTKPCEEQYGSTYRCVSVLTVLHQDWLNGKEYKCKVS |
| | | | | NKALPAPIEKTISKAKGQPREPQVYTLPPSREEMTKNQVSLTCLVKGFY |
| | | | | PSDIAVEWESNGQPENNYKTTPPVLDSDGSFFLYSKLTVDKSRWQQGN |
| | | | | VFSCSVMHEALHNHYTQKSLSLSPGKGGGGSGGGGSGGGGSGGGGSG |
| | | | | GGGSGGGGSDKTHTCPPCPAPELLGGPSVFLFPPKPKDTLMISRTPEVT |
| | | | | CVVVDVSHEDPEVKFNWYVDGVEVHNAKTKPCEEQYGSTYRCVSVL |
| | | | | TVLHQDWLNGKEYKCKVSNKALPAPIEKTISKAKGQPREPQVYTLPPS |
| | | | | REEMTKNQVSLTCLVKGFYPSDIAVEWESNGQPENNYKTTPPVLDSDG |
| | | | | SFFLYSKLTVDKSRWQQGNVFSCSVMHEALHNHYTQKSLSLSPGK |
| 58. | HCDR1 CD20 82- | arti- | aa | DYAMH |
| | A3 CC | ficial | | |
| 59. | HCDR2 | arti- | aa | GIAWNSDSIGYADSVKG |
| | | ficial | | |
| 60. | HCDR3 | arti- | aa | DTLYGSGSPRAFDI |
| | | ficial | | |
| 61. | LCDR1 | arti- | aa | RASQSVNNNLA |
| | | ficial | | |
| 62. | LCDR2 | arti- | aa | GASTRAT |
| | | ficial | | |
| 63. | LCDR3 | arti- | aa | QQSNNWPIT |
| | | ficial | | |
| 64. | VH | arti- | aa | EVQLVESGGGLVQPDRSLRLSCAASGFTFRDYAMHWVRQAPGKCLE |
| | | ficial | | WVSGIAWNSDSIGYADSVKGRFTISRDNAKNSLFLQMHSLRPEDTALY |
| | | | | FCAKDTLYGSGSPRAFDIWGQGTMVTVSS |
| 65. | VL | arti- | aa | EIVLTQSPATLSVSPGERATLSCRASQSVNNNLAWYQQKPGQAPRLLIY |
| | | ficial | | GASTRATGIPARFSGSGSGTEFTLTISRLEPEDFAVYYCQQSNNWPITFG |
| | | | | CGTRLEIK |
| 66. | scFv | arti- | aa | EVQLVESGGGLVQPDRSLRLSCAASGFTFRDYAMHWVRQAPGKCLE |
| | | ficial | | WVSGIAWNSDSIGYADSVKGRFTISRDNAKNSLFLQMHSLRPEDTALY |
| | | | | FCAKDTLYGSGSPRAFDIWGQGTMVTVSSGGGGSGGGGSGGGGSEIVL |
| | | | | TQSPATLSVSPGERATLSCRASQSVNNNLAWYQQKPGQAPRLLIYGAS |
| | | | | TRATGIPARFSGSGSGTEFTLTISRLEPEDFAVYYCQQSNNWPITFGCGT |
| | | | | RLEIK |
| 67. | BISPECIFIC | arti- | aa | EVQLVESGGGLVQPDRSLRLSCAASGFTFRDYAMHWVRQAPGKCLE |
| | MOL. (I2C) | ficial | | WVSGIAWNSDSIGYADSVKGRFTISRDNAKNSLFLQMHSLRPEDTALY |
| | | | | FCAKDTLYGSGSPRAFDIWGQGTMVTVSSGGGGSGGGGSGGGGSEIVL |
| | | | | TQSPATLSVSPGERATLSCRASQSVNNNLAWYQQKPGQAPRLLIYGAS |
| | | | | TRATGIPARFSGSGSGTEFTLTISRLEPEDFAVYYCQQSNNWPITFGCGT |
| | | | | RLEIKSGGGGSEVQLVESGGGLVQPGGSLKLSCAASGFTFNKYAMNW |
| | | | | VRQAPGKGLEWVARIRSKYNNYATYYADSVKDRFTISRDDSKNTAYL |
| | | | | QMNNLKTEDTAVYYCVRHGNFGNSYISYWAYWGQGTLVTVSSGGGG |
| | | | | SGGGGSGGGGSQTVVTQEPSLTVSPGGTVTLTCGSSTGAVTSGNYPNW |
| | | | | VQQKPGQAPRGLIGGTKFLAPGTPARFSGSLLGGKAALTLSGVQPEDE |
| | | | | AEYYCVLWYSNRWVFGGGTKLTVL |
| 68. | BISPECIFIC | arti- | aa | EVQLVESGGGLVQPDRSLRLSCAASGFTFRDYAMHWVRQAPGKCLE |
| | MOL. (I2E) | ficial | | WVSGIAWNSDSIGYADSVKGRFTISRDNAKNSLFLQMHSLRPEDTALY |
| | | | | FCAKDTLYGSGSPRAFDIWGQGTMVTVSSGGGGSGGGGSGGGGSEIVL |
| | | | | TQSPATLSVSPGERATLSCRASQSVNNNLAWYQQKPGQAPRLLIYGAS |
| | | | | TRATGIPARFSGSGSGTEFTLTISRLEPEDFAVYYCQQSNNWPITFGCGT |
| | | | | RLEIKSGGGGSEVQLVESGGGLVQPGGSLKLSCAASGFTFNKYAINWV |
| | | | | RQAPGKGLEWVARIRSKYNNYATYYADAVKDRFTISRDDSKNTVYLQ |
| | | | | MNNLKTEDTAVYYCARAGNFGSSYISYWAYWGQGTLVTVSSGGGGS |
| | | | | GGGGSGGGGSQTVVTQEPSLTVSPGGTVTITCGSSTGAVTSGNYPNWV |
| | | | | QKKPGQAPRGLIGGTKFLAPGTPARFSGSLSGGKAALTLSGVQPEDEAE |
| | | | | YYCVLWYSNRWVFGSGTKLTVL |
| 69. | BiTE HLE (I2C) | arti- | aa | EVQLVESGGGLVQPDRSLRLSCAASGFTFRDYAMHWVRQAPGKCLE |
| | | ficial | | WVSGIAWNSDSIGYADSVKGRFTISRDNAKNSLFLQMHSLRPEDTALY |
| | | | | FCAKDTLYGSGSPRAFDIWGQGTMVTVSSGGGGSGGGGSGGGGSEIVL |
| | | | | TQSPATLSVSPGERATLSCRASQSVNNNLAWYQQKPGQAPRLLIYGAS |
| | | | | TRATGIPARFSGSGSGTEFTLTISRLEPEDFAVYYCQQSNNWPITFGCGT |
| | | | | RLEIKSGGGGSEVQLVESGGGLVQPGGSLKLSCAASGFTFNKYAMNW |
| | | | | VRQAPGKGLEWVARIRSKYNNYATYYADSVKDRFTISRDDSKNTAYL |
| | | | | QMNNLKTEDTAVYYCVRHGNFGNSYISYWAYWGQGTLVTVSSGGGG |
| | | | | SGGGGSGGGGSQTVVTQEPSLTVSPGGTVTLTCGSSTGAVTSGNYPNW |
| | | | | VQQKPGQAPRGLIGGTKFLAPGTPARFSGSLLGGKAALTLSGVQPEDE |
| | | | | AEYYCVLWYSNRWVFGGGTKLTVLGGGGDKTHTCPPCPAPELLGGPS |
| | | | | VFLFPPKPKDTLMISRTPEVTCVVVDVSHEDPEVKFNWYVDGVEVHN |
| | | | | AKTKPCEEQYGSTYRCVSVLTVLHQDWLNGKEYKCKVSNKALPAPIE |
| | | | | KTISKAKGQPREPQVYTLPPSREEMTKNQVSLTCLVKGFYPSDIAVEWE |
| | | | | SNGQPENNYKTTPPVLDSDGSFFLYSKLTVDKSRWQQGNVFSCSVMH |
| | | | | EALHNHYTQKSLSLSPGKGGGGSGGGGSGGGGSGGGGSGGGGSGGG |
| | | | | GSDKTHTCPPCPAPELLGGPSVFLFPPKPKDTLMISRTPEVTCVVVDVS |
| | | | | HEDPEVKFNWYVDGVEVHNAKTKPCEEQYGSTYRCVSVLTVLHQDW |
| | | | | LNGKEYKCKVSNKALPAPIEKTISKAKGQPREPQVYTLPPSREEMTKN |
| | | | | QVSLTCLVKGFYPSDIAVEWESNGQPENNYKTTPPVLDSDGSFFLYSKL |
| | | | | TVDKSRWQQGNVFSCSVMHEALHNHYTQKSLSLSPGK |
| 70. | BiTE HLE (I2E) | arti- | aa | EVQLVESGGGLVQPDRSLRLSCAASGFTFRDYAMHWVRQAPGKCLE |
| | | ficial | | WVSGIAWNSDSIGYADSVKGRFTISRDNAKNSLFLQMHSLRPEDTALY |
| | | | | FCAKDTLYGSGSPRAFDIWGQGTMVTVSSGGGGSGGGGSGGGGSEIVL |
| | | | | TQSPATLSVSPGERATLSCRASQSVNNNLAWYQQKPGQAPRLLIYGAS |
| | | | | TRATGIPARFSGSGSGTEFTLTISRLEPEDFAVYYCQQSNNWPITFGCGT |
| | | | | RLEIKSGGGGSEVQLVESGGGLVQPGGSLKLSCAASGFTFNKYAINWV |
| | | | | RQAPGKGLEWVARIRSKYNNYATYYADAVKDRFTISRDDSKNTVYLQ |
| | | | | MNNLKTEDTAVYYCARAGNFGSSYISYWAYWGQGTLVTVSSGGGGS |
| | | | | GGGGSGGGGSQTVVTQEPSLTVSPGGTVTITCGSSTGAVTSGNYPNWV |
| | | | | QKKPGQAPRGLIGGTKFLAPGTPARFSGSLSGGKAALTLSGVQPEDEAE |
| | | | | YYCVLWYSNRWVFGSGTKLTVLGGGGDKTHTCPPCPAPELLGGPSVF |
| | | | | LFPPKPKDTLMISRTPEVTCVVVDVSHEDPEVKFNWYVDGVEVHNAK |
| | | | | TKPCEEQYGSTYRCVSVLTVLHQDWLNGKEYKCKVSNKALPAPIEKTI |
| | | | | SKAKGQPREPQVYTLPPSREEMTKNQVSLTCLVKGFYPSDIAVEWESN |
| | | | | GQPENNYKTTPPVLDSDGSFFLYSKLTVDKSRWQQGNVFSCSVMHEA |
| | | | | LHNHYTQKSLSLSPGKGGGGSGGGGSGGGGSGGGGSGGGGSGGGGSD |
| | | | | KTHTCPPCPAPELLGGPSVFLFPPKPKDTLMISRTPEVTCVVVDVSHEDP |
| | | | | EVKFNWYVDGVEVHNAKTKPCEEQYGSTYRCVSVLTVLHQDWLNGK |
| | | | | EYKCKVSNKALPAPIEKTISKAKGQPREPQVYTLPPSREEMTKNQVSLT |
| | | | | CLVKGFYPSDIAVEWESNGQPENNYKTTPPVLDSDGSFFLYSKLTVDK |
| | | | | SRWQQGNVFSCSVMHEALHNHYTQKSLSLSPGK |
| 71. | HCDR1 CD20 82- | arti- | aa | GHAMT |
| | D2 CC | ficial | | |
| 72. | HCDR2 | arti- | aa | TIYGSGGYTYYAGSVKG |
| | | ficial | | |
| 73. | HCDR3 | arti- | aa | VGGYDWYFDL |
| | | ficial | | |
| 74. | LCDR1 | arti- | aa | GGHNIGSKNVH |
| | | ficial | | |
| 75. | LCDR2 | arti- | aa | RDTNRPS |
| | | ficial | | |
| 76. | LCDR3 | arti- | aa | QLWDSTTVV |
| | | ficial | | |
| 77. | VH | arti- | aa | EVQLLESGGGLVQPGGSLRLSCAASGFTFSGHAMTWVRQAPGKCLEW |
| | | ficial | | LSTIYGSGGYTYYAGSVKGRFTISRDNSKNTLYLQMNSLRAEDTAVYY |
| | | | | CAKVGGYDWYFDLWGRGTLVTVSS |
| 78. | VL | arti- | aa | SYELTQPPSVSVALGQTARITCGGHNIGSKNVHWYQQKPGQAPVLVIY |
| | | ficial | | RDTNRPSGIPERFSGSNSGNTATLTISRAQAGDEADYYCQLWDSTTVVF |
| | | | | GCGTKLTVL |
| 79. | scFv | arti- | aa | EVQLLESGGGLVQPGGSLRLSCAASGFTFSGHAMTWVRQAPGKCLEW |
| | | ficial | | LSTIYGSGGYTYYAGSVKGRFTISRDNSKNTLYLQMNSLRAEDTAVYY |
| | | | | CAKVGGYDWYFDLWGRGTLVTVSSGGGGSGGGGSGGGGSSYELTQP |
| | | | | PSVSVALGQTARITCGGHNIGSKNVHWYQQKPGQAPVLVIYRDTNRPS |
| | | | | GIPERFSGSNSGNTATLTISRAQAGDEADYYCQLWDSTTVVFGCGTKL |
| | | | | TVL |
| 80. | BISPECIFIC | arti- | aa | EVQLLESGGGLVQPGGSLRLSCAASGFTFSGHAMTWVRQAPGKCLEW |
| | MOL. (I2C) | ficial | | LSTIYGSGGYTYYAGSVKGRFTISRDNSKNTLYLQMNSLRAEDTAVYY |
| | | | | CAKVGGYDWYFDLWGRGTLVTVSSGGGGSGGGGSGGGGSSYELTQP |
| | | | | PSVSVALGQTARITCGGHNIGSKNVHWYQQKPGQAPVLVIYRDTNRPS |
| | | | | GIPERFSGSNSGNTATLTISRAQAGDEADYYCQLWDSTTVVFGCGTKL |
| | | | | TVLSGGGGSEVQLVESGGGLVQPGGSLKLSCAASGFTFNKYAMNWVR |
| | | | | QAPGKGLEWVARIRSKYNNYATYYADSVKDRFTISRDDSKNTAYLQM |
| | | | | NNLKTEDTAVYYCVRHGNFGNSYISYWAYWGQGTLVTVSSGGGGSG |
| | | | | GGGSGGGGSQTVVTQEPSLTVSPGGTVTLTCGSSTGAVTSGNYPNWV |
| | | | | QQKPGQAPRGLIGGTKFLAPGTPARFSGSLLGGKAALTLSGVQPEDEA |
| | | | | EYYCVLWYSNRWVFGGGTKLTVL |
| 81. | BISPECIFIC | arti- | aa | EVQLLESGGGLVQPGGSLRLSCAASGFTFSGHAMTWVRQAPGKCLEW |
| | MOL. (I2E) | ficial | | LSTIYGSGGYTYYAGSVKGRFTISRDNSKNTLYLQMNSLRAEDTAVYY |
| | | | | CAKVGGYDWYFDLWGRGTLVTVSSGGGGSGGGGSGGGGSSYELTQP |
| | | | | PSVSVALGQTARITCGGHNIGSKNVHWYQQKPGQAPVLVIYRDTNRPS |
| | | | | GIPERFSGSNSGNTATLTISRAQAGDEADYYCQLWDSTTVVFGCGTKL |
| | | | | TVLSGGGGSEVQLVESGGGLVQPGGSLKLSCAASGFTFNKYAINWVR |
| | | | | QAPGKGLEWVARIRSKYNNYATYYADAVKDRFTISRDDSKNTVYLQM |
| | | | | NNLKTEDTAVYYCARAGNFGSSYISYWAYWGQGTLVTVSSGGGGSG |
| | | | | GGGSGGGGSQTVVTQEPSLTVSPGGTVTITCGSSTGAVTSGNYPNWVQ |
| | | | | KKPGQAPRGLIGGTKFLAPGTPARFSGSLSGGKAALTLSGVQPEDEAEY |
| | | | | YCVLWYSNRWVFGSGTKLTVL |
| 82. | BiTE HLE (I2C) | arti- | aa | EVQLLESGGGLVQPGGSLRLSCAASGFTFSGHAMTWVRQAPGKCLEW |
| | | ficial | | LSTIYGSGGYTYYAGSVKGRFTISRDNSKNTLYLQMNSLRAEDTAVYY |
| | | | | CAKVGGYDWYFDLWGRGTLVTVSSGGGGSGGGGSGGGGSSYELTQP |
| | | | | PSVSVALGQTARITCGGHNIGSKNVHWYQQKPGQAPVLVIYRDTNRPS |
| | | | | GIPERFSGSNSGNTATLTISRAQAGDEADYYCQLWDSTTVVFGCGTKL |
| | | | | TVLSGGGGSEVQLVESGGGLVQPGGSLKLSCAASGFTFNKYAMNWVR |
| | | | | QAPGKGLEWVARIRSKYNNYATYYADSVKDRFTISRDDSKNTAYLQM |
| | | | | NNLKTEDTAVYYCVRHGNFGNSYISYWAYWGQGTLVTVSSGGGGSG |
| | | | | GGGSGGGGSQTVVTQEPSLTVSPGGTVTLTCGSSTGAVTSGNYPNWV |
| | | | | QQKPGQAPRGLIGGTKFLAPGTPARFSGSLLGGKAALTLSGVQPEDEA |
| | | | | EYYCVLWYSNRWVFGGGTKLTVLGGGGDKTHTCPPCPAPELLGGPSV |
| | | | | FLFPPKPKDTLMISRTPEVTCVVVDVSHEDPEVKFNWYVDGVEVHNA |
| | | | | KTKPCEEQYGSTYRCVSVLTVLHQDWLNGKEYKCKVSNKALPAPIEK |
| | | | | TISKAKGQPREPQVYTLPPSREEMTKNQVSLTCLVKGFYPSDIAVEWES |
| | | | | NGQPENNYKTTPPVLDSDGSFFLYSKLTVDKSRWQQGNVFSCSVMHE |
| | | | | ALHNHYTQKSLSLSPGKGGGGSGGGGSGGGGSGGGGSGGGGSGGGGS |
| | | | | DKTHTCPPCPAPELLGGPSVFLFPPKPKDTLMISRTPEVTCVVVDVSHE |
| | | | | DPEVKFNWYVDGVEVHNAKTKPCEEQYGSTYRCVSVLTVLHQDWLN |
| | | | | GKEYKCKVSNKALPAPIEKTISKAKGQPREPQVYTLPPSREEMTKNQVS |
| | | | | LTCLVKGFYPSDIAVEWESNGQPENNYKTTPPVLDSDGSFFLYSKLTVD |
| | | | | KSRWQQGNVFSCSVMHEALHNHYTQKSLSLSPGK |
| 83. | BiTE HLE (I2E) | arti- | aa | EVQLLESGGGLVQPGGSLRLSCAASGFTFSGHAMTWVRQAPGKCLEW |
| | | ficial | | LSTIYGSGGYTYYAGSVKGRFTISRDNSKNTLYLQMNSLRAEDTAVYY |
| | | | | CAKVGGYDWYFDLWGRGTLVTVSSGGGGSGGGGSGGGGSSYELTQP |
| | | | | PSVSVALGQTARITCGGHNIGSKNVHWYQQKPGQAPVLVIYRDTNRPS |
| | | | | GIPERFSGSNSGNTATLTISRAQAGDEADYYCQLWDSTTVVFGCGTKL |
| | | | | TVLSGGGGSEVQLVESGGGLVQPGGSLKLSCAASGFTFNKYAINWVR |
| | | | | QAPGKGLEWVARIRSKYNNYATYYADAVKDRFTISRDDSKNTVYLQM |
| | | | | NNLKTEDTAVYYCARAGNFGSSYISYWAYWGQGTLVTVSSGGGGSG |
| | | | | GGGSGGGGSQTVVTQEPSLTVSPGGTVTITCGSSTGAVTSGNYPNWVQ |
| | | | | KKPGQAPRGLIGGTKFLAPGTPARFSGSLSGGKAALTLSGVQPEDEAEY |
| | | | | YCVLWYSNRWVFGSGTKLTVLGGGGDKTHTCPPCPAPELLGGPSVFLF |
| | | | | PPKPKDTLMISRTPEVTCVVVDVSHEDPEVKFNWYVDGVEVHNAKTK |
| | | | | PCEEQYGSTYRCVSVLTVLHQDWLNGKEYKCKVSNKALPAPIEKTISK |
| | | | | AKGQPREPQVYTLPPSREEMTKNQVSLTCLVKGFYPSDIAVEWESNGQ |
| | | | | PENNYKTTPPVLDSDGSFFLYSKLTVDKSRWQQGNVFSCSVMHEALH |
| | | | | NHYTQKSLSLSPGKGGGGSGGGGSGGGGSGGGGSGGGGSGGGGSDKT |
| | | | | HTCPPCPAPELLGGPSVFLFPPKPKDTLMISRTPEVTCVVVDVSHEDPEV |
| | | | | KFNWYVDGVEVHNAKTKPCEEQYGSTYRCVSVLTVLHQDWLNGKEY |
| | | | | KCKVSNKALPAPIEKTISKAKGQPREPQVYTLPPSREEMTKNQVSLTCL |
| | | | | VKGFYPSDIAVEWESNGQPENNYKTTPPVLDSDGSFFLYSKLTVDKSR |
| | | | | WQQGNVFSCSVMHEALHNHYTQKSLSLSPGK |
| 84. | HCDR1 CD20 82- | arti- | aa | DYTMH |
| | E2 CC | ficial | | |
| 85. | HCDR2 | arti- | aa | GIGWNGYSKGYADSVKG |
| | | ficial | | |
| 86. | HCDR3 | arti- | aa | DYHYGSGILDNYYGLDV |
| | | ficial | | |
| 87. | LCDR1 | arti- | aa | RASQSISNNLA |
| | | ficial | | |
| 88. | LCDR2 | arti- | aa | GASSRAT |
| | | ficial | | |
| 89. | LCDR3 | arti- | aa | QQYKNWPLT |
| | | ficial | | |
| 90. | VH | arti- | aa | EVQLVESGGGLVQPGGSLTLSCAASGFTFHDYTMHWVRQTPGKCLEW |
| | | ficial | | LSGIGWNGYSKGYADSVKGRFTISRDNAKNSLFLQMNSLTSDDTALYY |
| | | | | CVKDYHYGSGILDNYYGLDVWGQGTTVTVSS |
| 91. | VL | arti- | aa | EIVLTQSPATLSVSPGERATLSCRASQSISNNLAWYQQKPGQAPRLLIY |
| | | ficial | | GASSRATGIPDRFSGSGSGTEFTLTISSLQSEDFAVYYCQQYKNWPLTF |
| | | | | GCGTKVDIK |
| 92. | scFv | arti- | aa | EVQLVESGGGLVQPGGSLTLSCAASGFTFHDYTMHWVRQTPGKCLEW |
| | | ficial | | LSGIGWNGYSKGYADSVKGRFTISRDNAKNSLFLQMNSLTSDDTALYY |
| | | | | CVKDYHYGSGILDNYYGLDVWGQGTTVTVSSGGGGSGGGGSGGGGS |
| | | | | EIVLTQSPATLSVSPGERATLSCRASQSISNNLAWYQQKPGQAPRLLIY |
| | | | | GASSRATGIPDRFSGSGSGTEFTLTISSLQSEDFAVYYCQQYKNWPLTF |
| | | | | GCGTKVDIK |
| 93. | BISPECIFIC | arti- | aa | EVQLVESGGGLVQPGGSLTLSCAASGFTFHDYTMHWVRQTPGKCLEW |
| | MOL. (I2C) | ficial | | LSGIGWNGYSKGYADSVKGRFTISRDNAKNSLFLQMNSLTSDDTALYY |
| | | | | CVKDYHYGSGILDNYYGLDVWGQGTTVTVSSGGGGSGGGGSGGGGS |
| | | | | EIVLTQSPATLSVSPGERATLSCRASQSISNNLAWYQQKPGQAPRLLIY |
| | | | | GASSRATGIPDRFSGSGSGTEFTLTISSLQSEDFAVYYCQQYKNWPLTF |
| | | | | GCGTKVDIKSGGGGSEVQLVESGGGLVQPGGSLKLSCAASGFTFNKYA |
| | | | | MNWVRQAPGKGLEWVARIRSKYNNYATYYADSVKDRFTISRDDSKN |
| | | | | TAYLQMNNLKTEDTAVYYCVRHGNFGNSYISYWAYWGQGTLVTVSS |
| | | | | GGGGSGGGGSGGGGSQTVVTQEPSLTVSPGGTVTLTCGSSTGAVTSGN |
| | | | | YPNWVQQKPGQAPRGLIGGTKFLAPGTPARFSGSLLGGKAALTLSGVQ |
| | | | | PEDEAEYYCVLWYSNRWVFGGGTKLTVL |
| 94. | BISPECIFIC | arti- | aa | EVQLVESGGGLVQPGGSLTLSCAASGFTFHDYTMHWVRQTPGKCLEW |
| | MOL. (I2E) | ficial | | LSGIGWNGYSKGYADSVKGRFTISRDNAKNSLFLQMNSLTSDDTALYY |
| | | | | CVKDYHYGSGILDNYYGLDVWGQGTTVTVSSGGGGSGGGGSGGGGS |
| | | | | EIVLTQSPATLSVSPGERATLSCRASQSISNNLAWYQQKPGQAPRLLIY |
| | | | | GASSRATGIPDRFSGSGSGTEFTLTISSLQSEDFAVYYCQQYKNWPLTF |
| | | | | GCGTKVDIKSGGGGSEVQLVESGGGLVQPGGSLKLSCAASGFTFNKYA |
| | | | | INWVRQAPGKGLEWVARIRSKYNNYATYYADAVKDRFTISRDDSKNT |
| | | | | VYLQMNNLKTEDTAVYYCARAGNFGSSYISYWAYWGQGTLVTVSSG |
| | | | | GGGSGGGGSGGGGSQTVVTQEPSLTVSPGGTVTITCGSSTGAVTSGNY |
| | | | | PNWVQKKPGQAPRGLIGGTKFLAPGTPARFSGSLSGGKAALTLSGVQP |
| | | | | EDEAEYYCVLWYSNRWVFGSGTKLTVL |
| 95. | BiTE HLE (I2C) | arti- | aa | EVQLVESGGGLVQPGGSLTLSCAASGFTFHDYTMHWVRQTPGKCLEW |
| | | ficial | | LSGIGWNGYSKGYADSVKGRFTISRDNAKNSLFLQMNSLTSDDTALYY |
| | | | | CVKDYHYGSGILDNYYGLDVWGQGTTVTVSSGGGGSGGGGSGGGGS |
| | | | | EIVLTQSPATLSVSPGERATLSCRASQSISNNLAWYQQKPGQAPRLLIY |
| | | | | GASSRATGIPDRFSGSGSGTEFTLTISSLQSEDFAVYYCQQYKNWPLTF |
| | | | | GCGTKVDIKSGGGGSEVQLVESGGGLVQPGGSLKLSCAASGFTFNKYA |
| | | | | MNWVRQAPGKGLEWVARIRSKYNNYATYYADSVKDRFTISRDDSKN |
| | | | | TAYLQMNNLKTEDTAVYYCVRHGNFGNSYISYWAYWGQGTLVTVSS |
| | | | | GGGGSGGGGSGGGGSQTVVTQEPSLTVSPGGTVTLTCGSSTGAVTSGN |
| | | | | YPNWVQQKPGQAPRGLIGGTKFLAPGTPARFSGSLLGGKAALTLSGVQ |
| | | | | PEDEAEYYCVLWYSNRWVFGGGTKLTVLGGGGDKTHTCPPCPAPELL |
| | | | | GGPSVFLFPPKPKDTLMISRTPEVTCVVVDVSHEDPEVKFNWYVDGVE |
| | | | | VHNAKTKPCEEQYGSTYRCVSVLTVLHQDWLNGKEYKCKVSNKALP |
| | | | | APIEKTISKAKGQPREPQVYTLPPSREEMTKNQVSLTCLVKGFYPSDIA |
| | | | | VEWESNGQPENNYKTTPPVLDSDGSFFLYSKLTVDKSRWQQGNVFSCS |
| | | | | VMHEALHNHYTQKSLSLSPGKGGGGSGGGGSGGGGSGGGGSGGGGS |
| | | | | GGGGSDKTHTCPPCPAPELLGGPSVFLFPPKPKDTLMISRTPEVTCVVV |
| | | | | DVSHEDPEVKFNWYVDGVEVHNAKTKPCEEQYGSTYRCVSVLTVLH |
| | | | | QDWLNGKEYKCKVSNKALPAPIEKTISKAKGQPREPQVYTLPPSREEM |
| | | | | TKNQVSLTCLVKGFYPSDIAVEWESNGQPENNYKTTPPVLDSDGSFFL |
| | | | | YSKLTVDKSRWQQGNVFSCSVMHEALHNHYTQKSLSLSPGK |
| 96. | BiTE HLE (I2E) | arti- | aa | EVQLVESGGGLVQPGGSLTLSCAASGFTFHDYTMHWVRQTPGKCLEW |
| | | ficial | | LSGIGWNGYSKGYADSVKGRFTISRDNAKNSLFLQMNSLTSDDTALYY |
| | | | | CVKDYHYGSGILDNYYGLDVWGQGTTVTVSSGGGGSGGGGSGGGGS |
| | | | | EIVLTQSPATLSVSPGERATLSCRASQSISNNLAWYQQKPGQAPRLLIY |
| | | | | GASSRATGIPDRFSGSGSGTEFTLTISSLQSEDFAVYYCQQYKNWPLTF |
| | | | | GCGTKVDIKSGGGGSEVQLVESGGGLVQPGGSLKLSCAASGFTFNKYA |
| | | | | INWVRQAPGKGLEWVARIRSKYNNYATYYADAVKDRFTISRDDSKNT |
| | | | | VYLQMNNLKTEDTAVYYCARAGNFGSSYISYWAYWGQGTLVTVSSG |
| | | | | GGGSGGGGSGGGGSQTVVTQEPSLTVSPGGTVTITCGSSTGAVTSGNY |
| | | | | PNWVQKKPGQAPRGLIGGTKFLAPGTPARFSGSLSGGKAALTLSGVQP |
| | | | | EDEAEYYCVLWYSNRWVFGSGTKLTVLGGGGDKTHTCPPCPAPELLG |
| | | | | GPSVFLFPPKPKDTLMISRTPEVTCVVVDVSHEDPEVKFNWYVDGVEV |
| | | | | HNAKTKPCEEQYGSTYRCVSVLTVLHQDWLNGKEYKCKVSNKALPAP |
| | | | | IEKTISKAKGQPREPQVYTLPPSREEMTKNQVSLTCLVKGFYPSDIAVE |
| | | | | WESNGQPENNYKTTPPVLDSDGSFFLYSKLTVDKSRWQQGNVFSCSV |
| | | | | MHEALHNHYTQKSLSLSPGKGGGGSGGGGSGGGGSGGGGSGGGGSG |
| | | | | GGGSDKTHTCPPCPAPELLGGPSVFLFPPKPKDTLMISRTPEVTCVVVD |
| | | | | VSHEDPEVKFNWYVDGVEVHNAKTKPCEEQYGSTYRCVSVLTVLHQ |
| | | | | DWLNGKEYKCKVSNKALPAPIEKTISKAKGQPREPQVYTLPPSREEMT |
| | | | | KNQVSLTCLVKGFYPSDIAVEWESNGQPENNYKTTPPVLDSDGSFFLY |
| | | | | SKLTVDKSRWQQGNVFSCSVMHEALHNHYTQKSLSLSPGK |
| 97. | HCDR1 CD20 82- | arti- | aa | DYTMH |
| | G2 CC | ficial | | |
| 98. | HCDR2 | arti- | aa | GISWNTGTIGYADSVKG |
| | | ficial | | |
| 99. | HCDR3 | arti- | aa | DAFYGGDYYYNYGMDV |
| | | ficial | | |
| 100. | LCDR1 | arti- | aa | RASQSVNNNLA |
| | | ficial | | |
| 101. | LCDR2 | arti- | aa | GASTRAT |
| | | ficial | | |
| 102. | LCDR3 | arti- | aa | QQYNNWPLT |
| | | ficial | | |
| 103. | VH | arti- | aa | EVQLVESGGGLVQPGRSLRLSCAASGFTFHDYTMHWVRQAPGKCLEW |
| | | ficial | | VSGISWNTGTIGYADSVKGRFTISRDNAKNSLYLQMNSLRAEDTALYY |
| | | | | CVKDAFYGGDYYYNYGMDVWGHGTTVTVSS |
| 104. | VL | arti- | aa | EIVLTQSPATLSVSPGERATLSCRASQSVNNNLAWYQQKPGQAPRLLIY |
| | | ficial | | GASTRATGIPARFSGSGSGTDFTLTISSLQSDDFAVYYCQQYNNWPLTF |
| | | | | GCGTKVEIK |
| 105. | scFv | arti- | aa | EVQLVESGGGLVQPGRSLRLSCAASGFTFHDYTMHWVRQAPGKCLEW |
| | | ficial | | VSGISWNTGTIGYADSVKGRFTISRDNAKNSLYLQMNSLRAEDTALYY |
| | | | | CVKDAFYGGDYYYNYGMDVWGHGTTVTVSSGGGGSGGGGSGGGGS |
| | | | | EIVLTQSPATLSVSPGERATLSCRASQSVNNNLAWYQQKPGQAPRLLIY |
| | | | | GASTRATGIPARFSGSGSGTDFTLTISSLQSDDFAVYYCQQYNNWPLTF |
| | | | | GCGTKVEIK |
| 106. | BISPECIFIC | arti- | aa | EVQLVESGGGLVQPGRSLRLSCAASGFTFHDYTMHWVRQAPGKCLEW |
| | MOL. (I2C) | ficial | | VSGISWNTGTIGYADSVKGRFTISRDNAKNSLYLQMNSLRAEDTALYY |
| | | | | CVKDAFYGGDYYYNYGMDVWGHGTTVTVSSGGGGSGGGGSGGGGS |
| | | | | EIVLTQSPATLSVSPGERATLSCRASQSVNNNLAWYQQKPGQAPRLLIY |
| | | | | GASTRATGIPARFSGSGSGTDFTLTISSLQSDDFAVYYCQQYNNWPLTF |
| | | | | GCGTKVEIKSGGGGSEVQLVESGGGLVQPGGSLKLSCAASGFTFNKYA |
| | | | | MNWVRQAPGKGLEWVARIRSKYNNYATYYADSVKDRFTISRDDSKN |
| | | | | TAYLQMNNLKTEDTAVYYCVRHGNFGNSYISYWAYWGQGTLVTVSS |
| | | | | GGGGSGGGGSGGGGSQTVVTQEPSLTVSPGGTVTLTCGSSTGAVTSGN |
| | | | | YPNWVQQKPGQAPRGLIGGTKFLAPGTPARFSGSLLGGKAALTLSGVQ |
| | | | | PEDEAEYYCVLWYSNRWVFGGGTKLTVL |
| 107. | BISPECIFIC | arti- | aa | EVQLVESGGGLVQPGRSLRLSCAASGFTFHDYTMHWVRQAPGKCLEW |
| | MOL. (I2E) | ficial | | VSGISWNTGTIGYADSVKGRFTISRDNAKNSLYLQMNSLRAEDTALYY |
| | | | | CVKDAFYGGDYYYNYGMDVWGHGTTVTVSSGGGGSGGGGSGGGGS |
| | | | | EIVLTQSPATLSVSPGERATLSCRASQSVNNNLAWYQQKPGQAPRLLIY |
| | | | | GASTRATGIPARFSGSGSGTDFTLTISSLQSDDFAVYYCQQYNNWPLTF |
| | | | | GCGTKVEIKSGGGGSEVQLVESGGGLVQPGGSLKLSCAASGFTFNKYA |
| | | | | INWVRQAPGKGLEWVARIRSKYNNYATYYADAVKDRFTISRDDSKNT |
| | | | | VYLQMNNLKTEDTAVYYCARAGNFGSSYISYWAYWGQGTLVTVSSG |
| | | | | GGGSGGGGSGGGGSQTVVTQEPSLTVSPGGTVTITCGSSTGAVTSGNY |
| | | | | PNWVQKKPGQAPRGLIGGTKFLAPGTPARFSGSLSGGKAALTLSGVQP |
| | | | | EDEAEYYCVLWYSNRWVFGSGTKLTVL |
| 108. | BiTE HLE (I2C) | arti- | aa | EVQLVESGGGLVQPGRSLRLSCAASGFTFHDYTMHWVRQAPGKCLEW |
| | | ficial | | VSGISWNTGTIGYADSVKGRFTISRDNAKNSLYLQMNSLRAEDTALYY |
| | | | | CVKDAFYGGDYYYNYGMDVWGHGTTVTVSSGGGGSGGGGSGGGGS |
| | | | | EIVLTQSPATLSVSPGERATLSCRASQSVNNNLAWYQQKPGQAPRLLIY |
| | | | | GASTRATGIPARFSGSGSGTDFTLTISSLQSDDFAVYYCQQYNNWPLTF |
| | | | | GCGTKVEIKSGGGGSEVQLVESGGGLVQPGGSLKLSCAASGFTFNKYA |
| | | | | MNWVRQAPGKGLEWVARIRSKYNNYATYYADSVKDRFTISRDDSKN |
| | | | | TAYLQMNNLKTEDTAVYYCVRHGNFGNSYISYWAYWGQGTLVTVSS |
| | | | | GGGGSGGGGSGGGGSQTVVTQEPSLTVSPGGTVTLTCGSSTGAVTSGN |
| | | | | YPNWVQQKPGQAPRGLIGGTKFLAPGTPARFSGSLLGGKAALTLSGVQ |
| | | | | PEDEAEYYCVLWYSNRWVFGGGTKLTVLGGGGDKTHTCPPCPAPELL |
| | | | | GGPSVFLFPPKPKDTLMISRTPEVTCVVVDVSHEDPEVKFNWYVDGVE |
| | | | | VHNAKTKPCEEQYGSTYRCVSVLTVLHQDWLNGKEYKCKVSNKALP |
| | | | | APIEKTISKAKGQPREPQVYTLPPSREEMTKNQVSLTCLVKGFYPSDIA |
| | | | | VEWESNGQPENNYKTTPPVLDSDGSFFLYSKLTVDKSRWQQGNVFSCS |
| | | | | VMHEALHNHYTQKSLSLSPGKGGGGSGGGGSGGGGSGGGGSGGGGS |
| | | | | GGGGSDKTHTCPPCPAPELLGGPSVFLFPPKPKDTLMISRTPEVTCVVV |
| | | | | DVSHEDPEVKFNWYVDGVEVHNAKTKPCEEQYGSTYRCVSVLTVLH |
| | | | | QDWLNGKEYKCKVSNKALPAPIEKTISKAKGQPREPQVYTLPPSREEM |
| | | | | TKNQVSLTCLVKGFYPSDIAVEWESNGQPENNYKTTPPVLDSDGSFFL |
| | | | | YSKLTVDKSRWQQGNVFSCSVMHEALHNHYTQKSLSLSPGK |
| 109. | BiTE HLE (I2E) | arti- | aa | EVQLVESGGGLVQPGRSLRLSCAASGFTFHDYTMHWVRQAPGKCLEW |
| | | ficial | | VSGISWNTGTIGYADSVKGRFTISRDNAKNSLYLQMNSLRAEDTALYY |
| | | | | CVKDAFYGGDYYYNYGMDVWGHGTTVTVSSGGGGSGGGGSGGGGS |
| | | | | EIVLTQSPATLSVSPGERATLSCRASQSVNNNLAWYQQKPGQAPRLLIY |
| | | | | GASTRATGIPARFSGSGSGTDFTLTISSLQSDDFAVYYCQQYNNWPLTF |
| | | | | GCGTKVEIKSGGGGSEVQLVESGGGLVQPGGSLKLSCAASGFTFNKYA |
| | | | | INWVRQAPGKGLEWVARIRSKYNNYATYYADAVKDRFTISRDDSKNT |
| | | | | VYLQMNNLKTEDTAVYYCARAGNFGSSYISYWAYWGQGTLVTVSSG |
| | | | | GGGSGGGGSGGGGSQTVVTQEPSLTVSPGGTVTITCGSSTGAVTSGNY |
| | | | | PNWVQKKPGQAPRGLIGGTKFLAPGTPARFSGSLSGGKAALTLSGVQP |
| | | | | EDEAEYYCVLWYSNRWVFGSGTKLTVLGGGGDKTHTCPPCPAPELLG |
| | | | | GPSVFLFPPKPKDTLMISRTPEVTCVVVDVSHEDPEVKFNWYVDGVEV |
| | | | | HNAKTKPCEEQYGSTYRCVSVLTVLHQDWLNGKEYKCKVSNKALPAP |
| | | | | IEKTISKAKGQPREPQVYTLPPSREEMTKNQVSLTCLVKGFYPSDIAVE |
| | | | | WESNGQPENNYKTTPPVLDSDGSFFLYSKLTVDKSRWQQGNVFSCSV |
| | | | | MHEALHNHYTQKSLSLSPGKGGGGSGGGGSGGGGSGGGGSGGGGSG |
| | | | | GGGSDKTHTCPPCPAPELLGGPSVFLFPPKPKDTLMISRTPEVTCVVVD |
| | | | | VSHEDPEVKFNWYVDGVEVHNAKTKPCEEQYGSTYRCVSVLTVLHQ |
| | | | | DWLNGKEYKCKVSNKALPAPIEKTISKAKGQPREPQVYTLPPSREEMT |
| | | | | KNQVSLTCLVKGFYPSDIAVEWESNGQPENNYKTTPPVLDSDGSFFLY |
| | | | | SKLTVDKSRWQQGNVFSCSVMHEALHNHYTQKSLSLSPGK |
| 110. | BISPECIFIC | arti- | aa | QVQLVQSGAEVKKPGASVKVSCKASGYTFTSYGISWVRQAPGQCLEW |
| | MOL. (I2E) CD22 | ficial | | MGWISAYSGNAIYAQKLQGRVTMTRDTSTSTAYMELRSLRSDDTAVY |
| | 28-B7 N65S CC | | | YCARDPDYYGSGSYSDYWGQGTLVTVSSGGGGSGGGGSGGGGSEIVL |
| | | | | TQSPATLSVSPGERATLSCRASQSVSSNLAWYQQKPGQAPRLLIYGASS |
| | | | | RATGIPARFSGSGSGTEFTLTISSLQSEDFAVYYCQQYHSWPLLTFGCGT |
| | | | | KVEIKSGGGGSEVQLVESGGGLVQPGGSLKLSCAASGFTFNKYAINWV |
| | | | | RQAPGKGLEWVARIRSKYNNYATYYADAVKDRFTISRDDSKNTVYLQ |
| | | | | MNNLKTEDTAVYYCARAGNFGSSYISYWAYWGQGTLVTVSSGGGGS |
| | | | | GGGGSGGGGSQTVVTQEPSLTVSPGGTVTITCGSSTGAVTSGNYPNWV |
| | | | | QKKPGQAPRGLIGGTKFLAPGTPARFSGSLSGGKAALTLSGVQPEDEAE |
| | | | | YYCVLWYSNRWVFGSGTKLTVL |
| 111. | BiTE HLE (I2E) | arti- | aa | QVQLVQSGAEVKKPGASVKVSCKASGYTFTSYGISWVRQAPGQCLEW |
| | | ficial | | MGWISAYSGNAIYAQKLQGRVTMTRDTSTSTAYMELRSLRSDDTAVY |
| | | | | YCARDPDYYGSGSYSDYWGQGTLVTVSSGGGGSGGGGSGGGGSEIVL |
| | | | | TQSPATLSVSPGERATLSCRASQSVSSNLAWYQQKPGQAPRLLIYGASS |
| | | | | RATGIPARFSGSGSGTEFTLTISSLQSEDFAVYYCQQYHSWPLLTFGCGT |
| | | | | KVEIKSGGGGSEVQLVESGGGLVQPGGSLKLSCAASGFTFNKYAINWV |
| | | | | RQAPGKGLEWVARIRSKYNNYATYYADAVKDRFTISRDDSKNTVYLQ |
| | | | | MNNLKTEDTAVYYCARAGNFGSSYISYWAYWGQGTLVTVSSGGGGS |
| | | | | GGGGSGGGGSQTVVTQEPSLTVSPGGTVTITCGSSTGAVTSGNYPNWV |
| | | | | QKKPGQAPRGLIGGTKFLAPGTPARFSGSLSGGKAALTLSGVQPEDEAE |
| | | | | YYCVLWYSNRWVFGSGTKLTVLGGGGDKTHTCPPCPAPELLGGPSVF |
| | | | | LFPPKPKDTLMISRTPEVTCVVVDVSHEDPEVKFNWYVDGVEVHNAK |
| | | | | TKPCEEQYGSTYRCVSVLTVLHQDWLNGKEYKCKVSNKALPAPIEKTI |
| | | | | SKAKGQPREPQVYTLPPSREEMTKNQVSLTCLVKGFYPSDIAVEWESN |
| | | | | GQPENNYKTTPPVLDSDGSFFLYSKLTVDKSRWQQGNVFSCSVMHEA |
| | | | | LHNHYTQKSLSLSPGKGGGGSGGGGSGGGGSGGGGSGGGGSGGGGSD |
| | | | | KTHTCPPCPAPELLGGPSVFLFPPKPKDTLMISRTPEVTCVVVDVSHEDP |
| | | | | EVKFNWYVDGVEVHNAKTKPCEEQYGSTYRCVSVLTVLHQDWLNGK |
| | | | | EYKCKVSNKALPAPIEKTISKAKGQPREPQVYTLPPSREEMTKNQVSLT |
| | | | | CLVKGFYPSDIAVEWESNGQPENNYKTTPPVLDSDGSFFLYSKLTVDK |
| | | | | SRWQQGNVFSCSVMHEALHNHYTQKSLSLSPGK |
| 112. | HCDR1 CD22 76- | arti- | aa | NYGIS |
| | H4 CC | ficial | | |
| 113. | HCDR2 | arti- | aa | WISAYNGKTSYAQKFQG |
| | | ficial | | |
| 114. | HCDR3 | arti- | aa | STGDGEY |
| | | ficial | | |
| 115. | LCDR1 | arti- | aa | RASQSVSSNLA |
| | | ficial | | |
| 116. | LCDR2 | arti- | aa | GASTRAT |
| | | ficial | | |
| 117. | LCDR3 | arti- | aa | QQYHTWPVLT |
| | | ficial | | |
| 118. | VH | arti- | aa | QVQLVQSGAEVKKPGASVKVSCKASGYTFNNYGISWVRQAPGQCLE |
| | | ficial | | WMGWISAYNGKTSYAQKFQGRVTMTTDTSTGTAYMELRSLRSDDTA |
| | | | | VYYCARSTGDGEYWGQGTLVTVSS |
| 119. | VL | arti- | aa | EIVMTQSPATLSVSPGERATLSCRASQSVSSNLAWYQQKPGQAPRLLIY |
| | | ficial | | GASTRATGIPARFSGGGSGTEFTLTISSLQSEDFAVYYCQQYHTWPVLT |
| | | | | FGCGTKVEIK |
| 120. | scFv | arti- | aa | QVQLVQSGAEVKKPGASVKVSCKASGYTFNNYGISWVRQAPGQCLE |
| | | ficial | | WMGWISAYNGKTSYAQKFQGRVTMTTDTSTGTAYMELRSLRSDDTA |
| | | | | VYYCARSTGDGEYWGQGTLVTVSSGGGGSGGGGSGGGGSEIVMTQSP |
| | | | | ATLSVSPGERATLSCRASQSVSSNLAWYQQKPGQAPRLLIYGASTRAT |
| | | | | GIPARFSGGGSGTEFTLTISSLQSEDFAVYYCQQYHTWPVLTFGCGTKV |
| | | | | EIK |
| 121. | BISPECIFIC | arti- | aa | QVQLVQSGAEVKKPGASVKVSCKASGYTFNNYGISWVRQAPGQCLE |
| | MOL. (I2C) | ficial | | WMGWISAYNGKTSYAQKFQGRVTMTTDTSTGTAYMELRSLRSDDTA |
| | | | | VYYCARSTGDGEYWGQGTLVTVSSGGGGSGGGGSGGGGSEIVMTQSP |
| | | | | ATLSVSPGERATLSCRASQSVSSNLAWYQQKPGQAPRLLIYGASTRAT |
| | | | | GIPARFSGGGSGTEFTLTISSLQSEDFAVYYCQQYHTWPVLTFGCGTKV |
| | | | | EIKSGGGGSEVQLVESGGGLVQPGGSLKLSCAASGFTFNKYAMNWVR |
| | | | | QAPGKGLEWVARIRSKYNNYATYYADSVKDRFTISRDDSKNTAYLQM |
| | | | | NNLKTEDTAVYYCVRHGNFGNSYISYWAYWGQGTLVTVSSGGGGSG |
| | | | | GGGSGGGGSQTVVTQEPSLTVSPGGTVTLTCGSSTGAVTSGNYPNWV |
| | | | | QQKPGQAPRGLIGGTKFLAPGTPARFSGSLLGGKAALTLSGVQPEDEA |
| | | | | EYYCVLWYSNRWVFGGGTKLTVL |
| 122. | BISPECIFIC | arti- | aa | QVQLVQSGAEVKKPGASVKVSCKASGYTFNNYGISWVRQAPGQCLE |
| | MOL. (I2E) | ficial | | WMGWISAYNGKTSYAQKFQGRVTMTTDTSTGTAYMELRSLRSDDTA |
| | | | | VYYCARSTGDGEYWGQGTLVTVSSGGGGSGGGGSGGGGSEIVMTQSP |
| | | | | ATLSVSPGERATLSCRASQSVSSNLAWYQQKPGQAPRLLIYGASTRAT |
| | | | | GIPARFSGGGSGTEFTLTISSLQSEDFAVYYCQQYHTWPVLTFGCGTKV |
| | | | | EIKSGGGGSEVQLVESGGGLVQPGGSLKLSCAASGFTFNKYAINWVRQ |
| | | | | APGKGLEWVARIRSKYNNYATYYADAVKDRFTISRDDSKNTVYLQMN |
| | | | | NLKTEDTAVYYCARAGNFGSSYISYWAYWGQGTLVTVSSGGGGSGG |
| | | | | GGSGGGGSQTVVTQEPSLTVSPGGTVTITCGSSTGAVTSGNYPNWVQK |
| | | | | KPGQAPRGLIGGTKFLAPGTPARFSGSLSGGKAALTLSGVQPEDEAEYY |
| | | | | CVLWYSNRWVFGSGTKLTVL |
| 123. | BiTE HLE (I2C) | arti- | aa | QVQLVQSGAEVKKPGASVKVSCKASGYTFNNYGISWVRQAPGQCLE |
| | | ficial | | WMGWISAYNGKTSYAQKFQGRVTMTTDTSTGTAYMELRSLRSDDTA |
| | | | | VYYCARSTGDGEYWGQGTLVTVSSGGGGSGGGGSGGGGSEIVMTQSP |
| | | | | ATLSVSPGERATLSCRASQSVSSNLAWYQQKPGQAPRLLIYGASTRAT |
| | | | | GIPARFSGGGSGTEFTLTISSLQSEDFAVYYCQQYHTWPVLTFGCGTKV |
| | | | | EIKSGGGGSEVQLVESGGGLVQPGGSLKLSCAASGFTFNKYAMNWVR |
| | | | | QAPGKGLEWVARIRSKYNNYATYYADSVKDRFTISRDDSKNTAYLQM |
| | | | | NNLKTEDTAVYYCVRHGNFGNSYISYWAYWGQGTLVTVSSGGGGSG |
| | | | | GGGSGGGGSQTVVTQEPSLTVSPGGTVTLTCGSSTGAVTSGNYPNWV |
| | | | | QQKPGQAPRGLIGGTKFLAPGTPARFSGSLLGGKAALTLSGVQPEDEA |
| | | | | EYYCVLWYSNRWVFGGGTKLTVLGGGGDKTHTCPPCPAPELLGGPSV |
| | | | | FLFPPKPKDTLMISRTPEVTCVVVDVSHEDPEVKFNWYVDGVEVHNA |
| | | | | KTKPCEEQYGSTYRCVSVLTVLHQDWLNGKEYKCKVSNKALPAPIEK |
| | | | | TISKAKGQPREPQVYTLPPSREEMTKNQVSLTCLVKGFYPSDIAVEWES |
| | | | | NGQPENNYKTTPPVLDSDGSFFLYSKLTVDKSRWQQGNVFSCSVMHE |
| | | | | ALHNHYTQKSLSLSPGKGGGGSGGGGSGGGGSGGGGSGGGGSGGGGS |
| | | | | DKTHTCPPCPAPELLGGPSVFLFPPKPKDTLMISRTPEVTCVVVDVSHE |
| | | | | DPEVKFNWYVDGVEVHNAKTKPCEEQYGSTYRCVSVLTVLHQDWLN |
| | | | | GKEYKCKVSNKALPAPIEKTISKAKGQPREPQVYTLPPSREEMTKNQVS |
| | | | | LTCLVKGFYPSDIAVEWESNGQPENNYKTTPPVLDSDGSFFLYSKLTVD |
| | | | | KSRWQQGNVFSCSVMHEALHNHYTQKSLSLSPGK |
| 124. | BiTE HLE (I2E) | arti- | aa | QVQLVQSGAEVKKPGASVKVSCKASGYTFNNYGISWVRQAPGQCLE |
| | | ficial | | WMGWISAYNGKTSYAQKFQGRVTMTTDTSTGTAYMELRSLRSDDTA |
| | | | | VYYCARSTGDGEYWGQGTLVTVSSGGGGSGGGGSGGGGSEIVMTQSP |
| | | | | ATLSVSPGERATLSCRASQSVSSNLAWYQQKPGQAPRLLIYGASTRAT |
| | | | | GIPARFSGGGSGTEFTLTISSLQSEDFAVYYCQQYHTWPVLTFGCGTKV |
| | | | | EIKSGGGGSEVQLVESGGGLVQPGGSLKLSCAASGFTFNKYAINWVRQ |
| | | | | APGKGLEWVARIRSKYNNYATYYADAVKDRFTISRDDSKNTVYLQMN |
| | | | | NLKTEDTAVYYCARAGNFGSSYISYWAYWGQGTLVTVSSGGGGSGG |
| | | | | GGSGGGGSQTVVTQEPSLTVSPGGTVTITCGSSTGAVTSGNYPNWVQK |
| | | | | KPGQAPRGLIGGTKFLAPGTPARFSGSLSGGKAALTLSGVQPEDEAEYY |
| | | | | CVLWYSNRWVFGSGTKLTVLGGGGDKTHTCPPCPAPELLGGPSVFLFP |
| | | | | PKPKDTLMISRTPEVTCVVVDVSHEDPEVKFNWYVDGVEVHNAKTKP |
| | | | | CEEQYGSTYRCVSVLTVLHQDWLNGKEYKCKVSNKALPAPIEKTISKA |
| | | | | KGQPREPQVYTLPPSREEMTKNQVSLTCLVKGFYPSDIAVEWESNGQP |
| | | | | ENNYKTTPPVLDSDGSFFLYSKLTVDKSRWQQGNVFSCSVMHEALHN |
| | | | | HYTQKSLSLSPGKGGGGSGGGGSGGGGSGGGGSGGGGSGGGGSDKTH |
| | | | | TCPPCPAPELLGGPSVFLFPPKPKDTLMISRTPEVTCVVVDVSHEDPEVK |
| | | | | FNWYVDGVEVHNAKTKPCEEQYGSTYRCVSVLTVLHQDWLNGKEYK |
| | | | | CKVSNKALPAPIEKTISKAKGQPREPQVYTLPPSREEMTKNQVSLTCLV |
| | | | | KGFYPSDIAVEWESNGQPENNYKTTPPVLDSDGSFFLYSKLTVDKSRW |
| | | | | QQGNVFSCSVMHEALHNHYTQKSLSLSPGK |
| 125. | HCDR1 CD22 | arti- | aa | NSDYFWG |
| | 97K-A8 CC | ficial | | |
| 126. | HCDR2 | arti- | aa | TIYYSGRTYYNPSLKS |
| | | ficial | | |
| 127. | HCDR3 | arti- | aa | YQYGSFDY |
| | | ficial | | |
| 128. | LCDR1 | arti- | aa | RSSQSLLHSNGYNYLD |
| | | ficial | | |
| 129. | LCDR2 | arti- | aa | LGSNRAS |
| | | ficial | | |
| 130. | LCDR3 | arti- | aa | MQALQTPYT |
| | | ficial | | |
| 131. | VH | arti- | aa | QLQLQESGPGLVKPSETLSLTCFVSGGSISNSDYFWGWIRQPPGKCLEW |
| | | ficial | | IGTIYYSGRTYYNPSLKSRVTISVDTSKNQFSLMLSSVTAVDTAVYYCA |
| | | | | RYQYGSFDYWGQGTLVTVSS |
| 132. | VL | arti- | aa | DIVMTQTPLSLPVTPGEPASISCRSSQSLLHSNGYNYLDWYLQKPGQSP |
| | | ficial | | QLLIYLGSNRASGVPDRFSGSGSGTDFTLKISRVEAEDVGVYYCMQAL |
| | | | | QTPYTFGCGTKVEIR |
| 133. | scFv | arti- | aa | QLQLQESGPGLVKPSETLSLTCFVSGGSISNSDYFWGWIRQPPGKCLEW |
| | | ficial | | IGTIYYSGRTYYNPSLKSRVTISVDTSKNQFSLMLSSVTAVDTAVYYCA |
| | | | | RYQYGSFDYWGQGTLVTVSSGGGGSGGGGSGGGGSDIVMTQTPLSLP |
| | | | | VTPGEPASISCRSSQSLLHSNGYNYLDWYLQKPGQSPQLLIYLGSNRAS |
| | | | | GVPDRFSGSGSGTDFTLKISRVEAEDVGVYYCMQALQTPYTFGCGTKV |
| | | | | EIR |
| 134. | BISPECIFIC | arti- | aa | QLQLQESGPGLVKPSETLSLTCFVSGGSISNSDYFWGWIRQPPGKCLEW |
| | MOL. (I2C) | ficial | | IGTIYYSGRTYYNPSLKSRVTISVDTSKNQFSLMLSSVTAVDTAVYYCA |
| | | | | RYQYGSFDYWGQGTLVTVSSGGGGSGGGGSGGGGSDIVMTQTPLSLP |
| | | | | VTPGEPASISCRSSQSLLHSNGYNYLDWYLQKPGQSPQLLIYLGSNRAS |
| | | | | GVPDRFSGSGSGTDFTLKISRVEAEDVGVYYCMQALQTPYTFGCGTKV |
| | | | | EIRSGGGGSEVQLVESGGGLVQPGGSLKLSCAASGFTFNKYAMNWVR |
| | | | | QAPGKGLEWVARIRSKYNNYATYYADSVKDRFTISRDDSKNTAYLQM |
| | | | | NNLKTEDTAVYYCVRHGNFGNSYISYWAYWGQGTLVTVSSGGGGSG |
| | | | | GGGSGGGGSQTVVTQEPSLTVSPGGTVTLTCGSSTGAVTSGNYPNWV |
| | | | | QQKPGQAPRGLIGGTKFLAPGTPARFSGSLLGGKAALTLSGVQPEDEA |
| | | | | EYYCVLWYSNRWVFGGGTKLTVL |
| 135. | BISPECIFIC | arti- | aa | QLQLQESGPGLVKPSETLSLTCFVSGGSISNSDYFWGWIRQPPGKCLEW |
| | MOL. (I2E) | ficial | | IGTIYYSGRTYYNPSLKSRVTISVDTSKNQFSLMLSSVTAVDTAVYYCA |
| | | | | RYQYGSFDYWGQGTLVTVSSGGGGSGGGGSGGGGSDIVMTQTPLSLP |
| | | | | VTPGEPASISCRSSQSLLHSNGYNYLDWYLQKPGQSPQLLIYLGSNRAS |
| | | | | GVPDRFSGSGSGTDFTLKISRVEAEDVGVYYCMQALQTPYTFGCGTKV |
| | | | | EIRSGGGGSEVQLVESGGGLVQPGGSLKLSCAASGFTFNKYAINWVRQ |
| | | | | APGKGLEWVARIRSKYNNYATYYADAVKDRFTISRDDSKNTVYLQMN |
| | | | | NLKTEDTAVYYCARAGNFGSSYISYWAYWGQGTLVTVSSGGGGSGG |
| | | | | GGSGGGGSQTVVTQEPSLTVSPGGTVTITCGSSTGAVTSGNYPNWVQK |
| | | | | KPGQAPRGLIGGTKFLAPGTPARFSGSLSGGKAALTLSGVQPEDEAEYY |
| | | | | CVLWYSNRWVFGSGTKLTVL |
| 136. | BiTE HLE (I2C) | arti- | aa | QLQLQESGPGLVKPSETLSLTCFVSGGSISNSDYFWGWIRQPPGKCLEW |
| | | ficial | | IGTIYYSGRTYYNPSLKSRVTISVDTSKNQFSLMLSSVTAVDTAVYYCA |
| | | | | RYQYGSFDYWGQGTLVTVSSGGGGGGGGSGGGGSDIVMTQTPLSLP |
| | | | | VTPGEPASISCRSSQSLLHSNGYNYLDWYLQKPGQSPQLLIYLGSNRAS |
| | | | | GVPDRFSGSGSGTDFTLKISRVEAEDVGVYYCMQALQTPYTFGCGTKV |
| | | | | EIRSGGGGSEVQLVESGGGLVQPGGSLKLSCAASGFTFNKYAMNWVR |
| | | | | QAPGKGLEWVARIRSKYNNYATYYADSVKDRFTISRDDSKNTAYLQM |
| | | | | NNLKTEDTAVYYCVRHGNFGNSYISYWAYWGQGTLVTVSSGGGGSG |
| | | | | GGGSGGGGSQTVVTQEPSLTVSPGGTVTLTCGSSTGAVTSGNYPNWV |
| | | | | QQKPGQAPRGLIGGTKFLAPGTPARFSGSLLGGKAALTLSGVQPEDEA |
| | | | | EYYCVLWYSNRWVFGGGTKLTVLGGGGDKTHTCPPCPAPELLGGPSV |
| | | | | FLFPPKPKDTLMISRTPEVTCVVVDVSHEDPEVKFNWYVDGVEVHNA |
| | | | | KTKPCEEQYGSTYRCVSVLTVLHQDWLNGKEYKCKVSNKALPAPIEK |
| | | | | TISKAKGQPREPQVYTLPPSREEMTKNQVSLTCLVKGFYPSDIAVEWES |
| | | | | NGQPENNYKTTPPVLDSDGSFFLYSKLTVDKSRWQQGNVFSCSVMHE |
| | | | | ALHNHYTQKSLSLSPGKGGGGSGGGGSGGGGSGGGGSGGGGSGGGGS |
| | | | | DKTHTCPPCPAPELLGGPSVFLFPPKPKDTLMISRTPEVTCVVVDVSHE |
| | | | | DPEVKFNWYVDGVEVHNAKTKPCEEQYGSTYRCVSVLTVLHQDWLN |
| | | | | GKEYKCKVSNKALPAPIEKTISKAKGQPREPQVYTLPPSREEMTKNQVS |
| | | | | LTCLVKGFYPSDIAVEWESNGQPENNYKTTPPVLDSDGSFFLYSKLTVD |
| | | | | KSRWQQGNVFSCSVMHEALHNHYTQKSLSLSPGK |
| 137. | BiTE HLE (I2E) | arti- | aa | QLQLQESGPGLVKPSETLSLTCFVSGGSISNSDYFWGWIRQPPGKCLEW |
| | | ficial | | IGTIYYSGRTYYNPSLKSRVTISVDTSKNQFSLMLSSVTAVDTAVYYCA |
| | | | | RYQYGSFDYWGQGTLVTVSSGGGGSGGGGSGGGGSDIVMTQTPLSLP |
| | | | | VTPGEPASISCRSSQSLLHSNGYNYLDWYLQKPGQSPQLLIYLGSNRAS |
| | | | | GVPDRFSGSGSGTDFTLKISRVEAEDVGVYYCMQALQTPYTFGCGTKV |
| | | | | EIRSGGGGSEVQLVESGGGLVQPGGSLKLSCAASGFTFNKYAINWVRQ |
| | | | | APGKGLEWVARIRSKYNNYATYYADAVKDRFTISRDDSKNTVYLQMN |
| | | | | NLKTEDTAVYYCARAGNFGSSYISYWAYWGQGTLVTVSSGGGGSGG |
| | | | | GGSGGGGSQTVVTQEPSLTVSPGGTVTITCGSSTGAVTSGNYPNWVQK |
| | | | | KPGQAPRGLIGGTKFLAPGTPARFSGSLSGGKAALTLSGVQPEDEAEYY |
| | | | | CVLWYSNRWVFGSGTKLTVLGGGGDKTHTCPPCPAPELLGGPSVFLFP |
| | | | | PKPKDTLMISRTPEVTCVVVDVSHEDPEVKFNWYVDGVEVHNAKTKP |
| | | | | CEEQYGSTYRCVSVLTVLHQDWLNGKEYKCKVSNKALPAPIEKTISKA |
| | | | | KGQPREPQVYTLPPSREEMTKNQVSLTCLVKGFYPSDIAVEWESNGQP |
| | | | | ENNYKTTPPVLDSDGSFFLYSKLTVDKSRWQQGNVFSCSVMHEALHN |
| | | | | HYTQKSLSLSPGKGGGGSGGGGSGGGGSGGGGSGGGGSGGGGSDKTH |
| | | | | TCPPCPAPELLGGPSVFLFPPKPKDTLMISRTPEVTCVVVDVSHEDPEVK |
| | | | | FNWYVDGVEVHNAKTKPCEEQYGSTYRCVSVLTVLHQDWLNGKEYK |
| | | | | CKVSNKALPAPIEKTISKAKGQPREPQVYTLPPSREEMTKNQVSLTCLV |
| | | | | KGFYPSDIAVEWESNGQPENNYKTTPPVLDSDGSFFLYSKLTVDKSRW |
| | | | | QQGNVFSCSVMHEALHNHYTQKSLSLSPGK |
| 138. | HCDR1 CD22 16- | arti- | aa | SYGIS |
| | G4 CC | ficial | | |
| 139. | HCDR2 | arti- | aa | WISAYNGNTIYAQKFQG |
| | | ficial | | |
| 140. | HCDR3 | arti- | aa | DPDYYGSGSYSDY |
| | | ficial | | |
| 141. | LCDR1 | arti- | aa | RASQSVSSNLA |
| | | ficial | | |
| 142. | LCDR2 | arti- | aa | GASSRAT |
| | | ficial | | |
| 143. | LCDR3 | arti- | aa | QQYHSWPLLT |
| | | ficial | | |
| 144. | VH | arti- | aa | QVQLVQSGAEVKKPGASVKVSCKASGYTFTSYGISWVRQAPGQCLEW |
| | | ficial | | MGWISAYNGNTIYAQKFQGRVTLTRDTSTSTAYMELRSLRSDDTAMY |
| | | | | YCARDPDYYGSGSYSDYWGQGTLVTVSS |
| 145. | VL | arti- | aa | EIVLTQSPATLSVSPGERATLSCRASQSVSSNLAWYQQKPGQAPRLLIY |
| | | ficial | | GASSRATGIPARFSGSGSGTEFTLTISSLQSEDFAVYYCQQYHSWPLLTF |
| | | | | GCGTKVEIK |
| 146. | scFv | arti- | aa | QVQLVQSGAEVKKPGASVKVSCKASGYTFTSYGISWVRQAPGQCLEW |
| | | ficial | | MGWISAYNGNTIYAQKFQGRVTLTRDTSTSTAYMELRSLRSDDTAMY |
| | | | | YCARDPDYYGSGSYSDYWGQGTLVTVSSGGGGSGGGGSGGGGSEIVL |
| | | | | TQSPATLSVSPGERATLSCRASQSVSSNLAWYQQKPGQAPRLLIYGASS |
| | | | | RATGIPARFSGSGSGTEFTLTISSLQSEDFAVYYCQQYHSWPLLTFGCGT |
| | | | | KVEIK |
| 147. | BISPECIFIC | arti- | aa | QVQLVQSGAEVKKPGASVKVSCKASGYTFTSYGISWVRQAPGQCLEW |
| | MOL. (I2C) | ficial | | MGWISAYNGNTIYAQKFQGRVTLTRDTSTSTAYMELRSLRSDDTAMY |
| | | | | YCARDPDYYGSGSYSDYWGQGTLVTVSSGGGGSGGGGSGGGGSEIVL |
| | | | | TQSPATLSVSPGERATLSCRASQSVSSNLAWYQQKPGQAPRLLIYGASS |
| | | | | RATGIPARFSGSGSGTEFTLTISSLQSEDFAVYYCQQYHSWPLLTFGCGT |
| | | | | KVEIKSGGGGSEVQLVESGGGLVQPGGSLKLSCAASGFTFNKYAMNW |
| | | | | VRQAPGKGLEWVARIRSKYNNYATYYADSVKDRFTISRDDSKNTAYL |
| | | | | QMNNLKTEDTAVYYCVRHGNFGNSYISYWAYWGQGTLVTVSSGGGG |
| | | | | SGGGGSGGGGSQTVVTQEPSLTVSPGGTVTLTCGSSTGAVTSGNYPNW |
| | | | | VQQKPGQAPRGLIGGTKFLAPGTPARFSGSLLGGKAALTLSGVQPEDE |
| | | | | AEYYCVLWYSNRWVFGGGTKLTVL |
| 148. | BISPECIFIC | arti- | aa | QVQLVQSGAEVKKPGASVKVSCKASGYTFTSYGISWVRQAPGQCLEW |
| | MOL. (I2E) | ficial | | MGWISAYNGNTIYAQKFQGRVTLTRDTSTSTAYMELRSLRSDDTAMY |
| | | | | YCARDPDYYGSGSYSDYWGQGTLVTVSSGGGGSGGGGSGGGGSEIVL |
| | | | | TQSPATLSVSPGERATLSCRASQSVSSNLAWYQQKPGQAPRLLIYGASS |
| | | | | RATGIPARFSGSGSGTEFTLTISSLQSEDFAVYYCQQYHSWPLLTFGCGT |
| | | | | KVEIKSGGGGSEVQLVESGGGLVQPGGSLKLSCAASGFTFNKYAINWV |
| | | | | RQAPGKGLEWVARIRSKYNNYATYYADAVKDRFTISRDDSKNTVYLQ |
| | | | | MNNLKTEDTAVYYCARAGNFGSSYISYWAYWGQGTLVTVSSGGGGS |
| | | | | GGGGSGGGGSQTVVTQEPSLTVSPGGTVTITCGSSTGAVTSGNYPNWV |
| | | | | QKKPGQAPRGLIGGTKFLAPGTPARFSGSLSGGKAALTLSGVQPEDEAE |
| | | | | YYCVLWYSNRWVFGSGTKLTVL |
| 149. | BiTE HLE (I2C) | arti- | aa | QVQLVQSGAEVKKPGASVKVSCKASGYTFTSYGISWVRQAPGQCLEW |
| | | ficial | | MGWISAYNGNTIYAQKFQGRVTLTRDTSTSTAYMELRSLRSDDTAMY |
| | | | | YCARDPDYYGSGSYSDYWGQGTLVTVSSGGGGSGGGGSGGGGSEIVL |
| | | | | TQSPATLSVSPGERATLSCRASQSVSSNLAWYQQKPGQAPRLLIYGASS |
| | | | | RATGIPARFSGSGSGTEFTLTISSLQSEDFAVYYCQQYHSWPLLTFGCGT |
| | | | | KVEIKSGGGGSEVQLVESGGGLVQPGGSLKLSCAASGFTFNKYAMNW |
| | | | | VRQAPGKGLEWVARIRSKYNNYATYYADSVKDRFTISRDDSKNTAYL |
| | | | | QMNNLKTEDTAVYYCVRHGNFGNSYISYWAYWGQGTLVTVSSGGGG |
| | | | | SGGGGSGGGGSQTVVTQEPSLTVSPGGTVTLTCGSSTGAVTSGNYPNW |
| | | | | VQQKPGQAPRGLIGGTKFLAPGTPARFSGSLLGGKAALTLSGVQPEDE |
| | | | | AEYYCVLWYSNRWVFGGGTKLTVLGGGGDKTHTCPPCPAPELLGGPS |
| | | | | VFLFPPKPKDTLMISRTPEVTCVVVDVSHEDPEVKFNWYVDGVEVHN |
| | | | | AKTKPCEEQYGSTYRCVSVLTVLHQDWLNGKEYKCKVSNKALPAPIE |
| | | | | KTISKAKGQPREPQVYTLPPSREEMTKNQVSLTCLVKGFYPSDIAVEWE |
| | | | | SNGQPENNYKTTPPVLDSDGSFFLYSKLTVDKSRWQQGNVFSCSVMH |
| | | | | EALHNHYTQKSLSLSPGKGGGGSGGGGSGGGGSGGGGSGGGGSGGG |
| | | | | GSDKTHTCPPCPAPELLGGPSVFLFPPKPKDTLMISRTPEVTCVVVDVS |
| | | | | HEDPEVKFNWYVDGVEVHNAKTKPCEEQYGSTYRCVSVLTVLHQDW |
| | | | | LNGKEYKCKVSNKALPAPIEKTISKAKGQPREPQVYTLPPSREEMTKN |
| | | | | QVSLTCLVKGFYPSDIAVEWESNGQPENNYKTTPPVLDSDGSFFLYSKL |
| | | | | TVDKSRWQQGNVFSCSVMHEALHNHYTQKSLSLSPGK |
| 150. | BiTE HLE (I2E) | arti- | aa | QVQLVQSGAEVKKPGASVKVSCKASGYTFTSYGISWVRQAPGQCLEW |
| | | ficial | | MGWISAYNGNTIYAQKFQGRVTLTRDTSTSTAYMELRSLRSDDTAMY |
| | | | | YCARDPDYYGSGSYSDYWGQGTLVTVSSGGGGSGGGGSGGGGSEIVL |
| | | | | TQSPATLSVSPGERATLSCRASQSVSSNLAWYQQKPGQAPRLLIYGASS |
| | | | | RATGIPARFSGSGSGTEFTLTISSLQSEDFAVYYCQQYHSWPLLTFGCGT |
| | | | | KVEIKSGGGGSEVQLVESGGGLVQPGGSLKLSCAASGFTFNKYAINWV |
| | | | | RQAPGKGLEWVARIRSKYNNYATYYADAVKDRFTISRDDSKNTVYLQ |
| | | | | MNNLKTEDTAVYYCARAGNFGSSYISYWAYWGQGTLVTVSSGGGGS |
| | | | | GGGGSGGGGSQTVVTQEPSLTVSPGGTVTITCGSSTGAVTSGNYPNWV |
| | | | | QKKPGQAPRGLIGGTKFLAPGTPARFSGSLSGGKAALTLSGVQPEDEAE |
| | | | | YYCVLWYSNRWVFGSGTKLTVLGGGGDKTHTCPPCPAPELLGGPSVF |
| | | | | LFPPKPKDTLMISRTPEVTCVVVDVSHEDPEVKFNWYVDGVEVHNAK |
| | | | | TKPCEEQYGSTYRCVSVLTVLHQDWLNGKEYKCKVSNKALPAPIEKTI |
| | | | | SKAKGQPREPQVYTLPPSREEMTKNQVSLTCLVKGFYPSDIAVEWESN |
| | | | | GQPENNYKTTPPVLDSDGSFFLYSKLTVDKSRWQQGNVFSCSVMHEA |
| | | | | LHNHYTQKSLSLSPGKGGGGSGGGGSGGGGSGGGGSGGGGSGGGGSD |
| | | | | KTHTCPPCPAPELLGGPSVFLFPPKPKDTLMISRTPEVTCVVVDVSHEDP |
| | | | | EVKFNWYVDGVEVHNAKTKPCEEQYGSTYRCVSVLTVLHQDWLNGK |
| | | | | EYKCKVSNKALPAPIEKTISKAKGQPREPQVYTLPPSREEMTKNQVSLT |
| | | | | CLVKGFYPSDIAVEWESNGQPENNYKTTPPVLDSDGSFFLYSKLTVDK |
| | | | | SRWQQGNVFSCSVMHEALHNHYTQKSLSLSPGK |
| 151. | HCDR1 CD22 17- | arti- | aa | TYGIS |
| | F6 CC | ficial | | |
| 152. | HCDR2 | arti- | aa | WISPKNGVTTYAQKFQG |
| | | ficial | | |
| 153. | HCDR3 | arti- | aa | DPDYYGSGSYSDY |
| | | ficial | | |
| 154. | LCDR1 | arti- | aa | RASQSVSSNLA |
| | | ficial | | |
| 155. | LCDR2 | arti- | aa | GASSRAT |
| | | ficial | | |
| 156. | LCDR3 | arti- | aa | QQYHSWPLLT |
| | | ficial | | |
| 157. | VH | arti- | aa | QVQLVQSGAEVKKPGASVKVSCKASGYTFTTYGISWVRQAPGQCLEW |
| | | ficial | | MGWISPKNGVTTYAQKFQGRVTITADESTSTAYMELSRLTSDDTAMY |
| | | | | YCARDPDYYGSGSYSDYWGQGTLVTVSS |
| 158. | VL | arti- | aa | EIVLTQSPATLSVSPGERATLSCRASQSVSSNLAWYQQKPGQAPRLLIY |
| | | ficial | | GASSRATGIPARFSGSGSGTEFTLTISSLQSEDFAVYYCQQYHSWPLLTF |
| | | | | GCGTKVEIK |
| 159. | scFv | arti- | aa | QVQLVQSGAEVKKPGASVKVSCKASGYTFTTYGISWVRQAPGQCLEW |
| | | ficial | | MGWISPKNGVTTYAQKFQGRVTITADESTSTAYMELSRLTSDDTAMY |
| | | | | YCARDPDYYGSGSYSDYWGQGTLVTVSSGGGGSGGGGSGGGGSEIVL |
| | | | | TQSPATLSVSPGERATLSCRASQSVSSNLAWYQQKPGQAPRLLIYGASS |
| | | | | RATGIPARFSGSGSGTEFTLTISSLQSEDFAVYYCQQYHSWPLLTFGCGT |
| | | | | KVEIK |
| 160. | BISPECIFIC | arti- | aa | QVQLVQSGAEVKKPGASVKVSCKASGYTFTTYGISWVRQAPGQCLEW |
| | MOL. (I2C) | ficial | | MGWISPKNGVTTYAQKFQGRVTITADESTSTAYMELSRLTSDDTAMY |
| | | | | YCARDPDYYGSGSYSDYWGQGTLVTVSSGGGGSGGGGSGGGGSEIVL |
| | | | | TQSPATLSVSPGERATLSCRASQSVSSNLAWYQQKPGQAPRLLIYGASS |
| | | | | RATGIPARFSGSGSGTEFTLTISSLQSEDFAVYYCQQYHSWPLLTFGCGT |
| | | | | KVEIKSGGGGSEVQLVESGGGLVQPGGSLKLSCAASGFTFNKYAMNW |
| | | | | VRQAPGKGLEWVARIRSKYNNYATYYADSVKDRFTISRDDSKNTAYL |
| | | | | QMNNLKTEDTAVYYCVRHGNFGNSYISYWAYWGQGTLVTVSSGGGG |
| | | | | SGGGGSGGGGSQTVVTQEPSLTVSPGGTVTLTCGSSTGAVTSGNYPNW |
| | | | | VQQKPGQAPRGLIGGTKFLAPGTPARFSGSLLGGKAALTLSGVQPEDE |
| | | | | AEYYCVLWYSNRWVFGGGTKLTVL |
| 161. | BISPECIFIC | arti- | aa | QVQLVQSGAEVKKPGASVKVSCKASGYTFTTYGISWVRQAPGQCLEW |
| | MOL. (I2E) | ficial | | MGWISPKNGVTTYAQKFQGRVTITADESTSTAYMELSRLTSDDTAMY |
| | | | | YCARDPDYYGSGSYSDYWGQGTLVTVSSGGGGGGGGSGGGGSEIVL |
| | | | | TQSPATLSVSPGERATLSCRASQSVSSNLAWYQQKPGQAPRLLIYGASS |
| | | | | RATGIPARFSGSGSGTEFTLTISSLQSEDFAVYYCQQYHSWPLLTFGCGT |
| | | | | KVEIKSGGGGSEVQLVESGGGLVQPGGSLKLSCAASGFTFNKYAINWV |
| | | | | RQAPGKGLEWVARIRSKYNNYATYYADAVKDRFTISRDDSKNTVYLQ |
| | | | | MNNLKTEDTAVYYCARAGNFGSSYISYWAYWGQGTLVTVSSGGGGS |
| | | | | GGGGSGGGGSQTVVTQEPSLTVSPGGTVTITCGSSTGAVTSGNYPNWV |
| | | | | QKKPGQAPRGLIGGTKFLAPGTPARFSGSLSGGKAALTLSGVQPEDEAE |
| | | | | YYCVLWYSNRWVFGSGTKLTVL |
| 162. | BiTE HLE (I2C) | arti- | aa | QVQLVQSGAEVKKPGASVKVSCKASGYTFTTYGISWVRQAPGQCLEW |
| | | ficial | | MGWISPKNGVTTYAQKFQGRVTITADESTSTAYMELSRLTSDDTAMY |
| | | | | YCARDPDYYGSGSYSDYWGQGTLVTVSSGGGGGGGGSGGGGSEIVL |
| | | | | TQSPATLSVSPGERATLSCRASQSVSSNLAWYQQKPGQAPRLLIYGASS |
| | | | | RATGIPARFSGSGSGTEFTLTISSLQSEDFAVYYCQQYHSWPLLTFGCGT |
| | | | | KVEIKSGGGGSEVQLVESGGGLVQPGGSLKLSCAASGFTFNKYAMNW |
| | | | | VRQAPGKGLEWVARIRSKYNNYATYYADSVKDRFTISRDDSKNTAYL |
| | | | | QMNNLKTEDTAVYYCVRHGNFGNSYISYWAYWGQGTLVTVSSGGGG |
| | | | | SGGGGSGGGGSQTVVTQEPSLTVSPGGTVTLTCGSSTGAVTSGNYPNW |
| | | | | VQQKPGQAPRGLIGGTKFLAPGTPARFSGSLLGGKAALTLSGVQPEDE |
| | | | | AEYYCVLWYSNRWVFGGGTKLTVLGGGGDKTHTCPPCPAPELLGGPS |
| | | | | VFLFPPKPKDTLMISRTPEVTCVVVDVSHEDPEVKFNWYVDGVEVHN |
| | | | | AKTKPCEEQYGSTYRCVSVLTVLHQDWLNGKEYKCKVSNKALPAPIE |
| | | | | KTISKAKGQPREPQVYTLPPSREEMTKNQVSLTCLVKGFYPSDIAVEWE |
| | | | | SNGQPENNYKTTPPVLDSDGSFFLYSKLTVDKSRWQQGNVFSCSVMH |
| | | | | EALHNHYTQKSLSLSPGKGGGGSGGGGSGGGGSGGGGSGGGGSGGG |
| | | | | GSDKTHTCPPCPAPELLGGPSVFLFPPKPKDTLMISRTPEVTCVVVDVS |
| | | | | HEDPEVKFNWYVDGVEVHNAKTKPCEEQYGSTYRCVSVLTVLHQDW |
| | | | | LNGKEYKCKVSNKALPAPIEKTISKAKGQPREPQVYTLPPSREEMTKN |
| | | | | QVSLTCLVKGFYPSDIAVEWESNGQPENNYKTTPPVLDSDGSFFLYSKL |
| | | | | TVDKSRWQQGNVFSCSVMHEALHNHYTQKSLSLSPGK |
| 163. | BiTE HLE (I2E) | arti- | aa | QVQLVQSGAEVKKPGASVKVSCKASGYTFTTYGISWVRQAPGQCLEW |
| | | ficial | | MGWISPKNGVTTYAQKFQGRVTITADESTSTAYMELSRLTSDDTAMY |
| | | | | YCARDPDYYGSGSYSDYWGQGTLVTVSSGGGGGGGGSGGGGSEIVL |
| | | | | TQSPATLSVSPGERATLSCRASQSVSSNLAWYQQKPGQAPRLLIYGASS |
| | | | | RATGIPARFSGSGSGTEFTLTISSLQSEDFAVYYCQQYHSWPLLTFGCGT |
| | | | | KVEIKSGGGGSEVQLVESGGGLVQPGGSLKLSCAASGFTFNKYAINWV |
| | | | | RQAPGKGLEWVARIRSKYNNYATYYADAVKDRFTISRDDSKNTVYLQ |
| | | | | MNNLKTEDTAVYYCARAGNFGSSYISYWAYWGQGTLVTVSSGGGGS |
| | | | | GGGGSGGGGSQTVVTQEPSLTVSPGGTVTITCGSSTGAVTSGNYPNWV |
| | | | | QKKPGQAPRGLIGGTKFLAPGTPARFSGSLSGGKAALTLSGVQPEDEAE |
| | | | | YYCVLWYSNRWVFGSGTKLTVLGGGGDKTHTCPPCPAPELLGGPSVF |
| | | | | LFPPKPKDTLMISRTPEVTCVVVDVSHEDPEVKFNWYVDGVEVHNAK |
| | | | | TKPCEEQYGSTYRCVSVLTVLHQDWLNGKEYKCKVSNKALPAPIEKTI |
| | | | | SKAKGQPREPQVYTLPPSREEMTKNQVSLTCLVKGFYPSDIAVEWESN |
| | | | | GQPENNYKTTPPVLDSDGSFFLYSKLTVDKSRWQQGNVFSCSVMHEA |
| | | | | LHNHYTQKSLSLSPGKGGGGSGGGGSGGGGSGGGGSGGGGSGGGGSD |
| | | | | KTHTCPPCPAPELLGGPSVFLFPPKPKDTLMISRTPEVTCVVVDVSHEDP |
| | | | | EVKFNWYVDGVEVHNAKTKPCEEQYGSTYRCVSVLTVLHQDWLNGK |
| | | | | EYKCKVSNKALPAPIEKTISKAKGQPREPQVYTLPPSREEMTKNQVSLT |
| | | | | CLVKGFYPSDIAVEWESNGQPENNYKTTPPVLDSDGSFFLYSKLTVDK |
| | | | | SRWQQGNVFSCSVMHEALHNHYTQKSLSLSPGK |
| 164. | HCDR1 CD22 43- | arti- | aa | SYGIS |
| | F7 CC | ficial | | |
| 165. | HCDR2 | arti- | aa | WISPQTGNAIYAQKLQG |
| | | ficial | | |
| 166. | HCDR3 | arti- | aa | DPDYYGSGSYSDY |
| | | ficial | | |
| 167. | LCDR1 | arti- | aa | RASQSVSSNLA |
| | | ficial | | |
| 168. | LCDR2 | arti- | aa | GASSRAT |
| | | ficial | | |
| 169. | LCDR3 | arti- | aa | QQYHSWPLLT |
| | | ficial | | |
| 170. | VH | arti- | aa | QVQLVQSGGEVKKPGASVKVSCKASGYTFTSYGISWVRQAPGQCLEW |
| | | cial | | MGWISPQTGNAIYAQKLQGRVTMTRDTSTSTAYMELRSLRSDDTAVY |
| | | | | YCARDPDYYGSGSYSDYWGQGTLVTVSS |
| 171. | VL | arti- | aa | EIVLTQSPATLSVSPGERATLSCRASQSVSSNLAWYQQKPGQAPRLLIY |
| | | ficial | | GASSRATGIPARFSGSGSGTEFTLTISSLQSEDFAVYYCQQYHSWPLLTF |
| | | | | GCGTKVEIK |
| 172. | scFv | arti- | aa | QVQLVQSGGEVKKPGASVKVSCKASGYTFTSYGISWVRQAPGQCLEW |
| | | ficial | | MGWISPQTGNAIYAQKLQGRVTMTRDTSTSTAYMELRSLRSDDTAVY |
| | | | | YCARDPDYYGSGSYSDYWGQGTLVTVSSGGGGSGGGGSGGGGSEIVL |
| | | | | TQSPATLSVSPGERATLSCRASQSVSSNLAWYQQKPGQAPRLLIYGASS |
| | | | | RATGIPARFSGSGSGTEFTLTISSLQSEDFAVYYCQQYHSWPLLTFGCGT |
| | | | | KVEIK |
| 173. | BISPECIFIC | arti- | aa | QVQLVQSGGEVKKPGASVKVSCKASGYTFTSYGISWVRQAPGQCLEW |
| | MOL. (I2C) | ficial | | MGWISPQTGNAIYAQKLQGRVTMTRDTSTSTAYMELRSLRSDDTAVY |
| | | | | YCARDPDYYGSGSYSDYWGQGTLVTVSSGGGGSGGGGSGGGGSEIVL |
| | | | | TQSPATLSVSPGERATLSCRASQSVSSNLAWYQQKPGQAPRLLIYGASS |
| | | | | RATGIPARFSGSGSGTEFTLTISSLQSEDFAVYYCQQYHSWPLLTFGCGT |
| | | | | KVEIKSGGGGSEVQLVESGGGLVQPGGSLKLSCAASGFTFNKYAMNW |
| | | | | VRQAPGKGLEWVARIRSKYNNYATYYADSVKDRFTISRDDSKNTAYL |
| | | | | QMNNLKTEDTAVYYCVRHGNFGNSYISYWAYWGQGTLVTVSSGGGG |
| | | | | SGGGGSGGGGSQTVVTQEPSLTVSPGGTVTLTCGSSTGAVTSGNYPNW |
| | | | | VQQKPGQAPRGLIGGTKFLAPGTPARFSGSLLGGKAALTLSGVQPEDE |
| | | | | AEYYCVLWYSNRWVFGGGTKLTVL |
| 174. | BISPECIFIC | arti- | aa | QVQLVQSGGEVKKPGASVKVSCKASGYTFTSYGISWVRQAPGQCLEW |
| | MOL. (I2E) | ficial | | MGWISPQTGNAIYAQKLQGRVTMTRDTSTSTAYMELRSLRSDDTAVY |
| | | | | YCARDPDYYGSGSYSDYWGQGTLVTVSSGGGGSGGGGSGGGGSEIVL |
| | | | | TQSPATLSVSPGERATLSCRASQSVSSNLAWYQQKPGQAPRLLIYGASS |
| | | | | RATGIPARFSGSGSGTEFTLTISSLQSEDFAVYYCQQYHSWPLLTFGCGT |
| | | | | KVEIKSGGGGSEVQLVESGGGLVQPGGSLKLSCAASGFTFNKYAINWV |
| | | | | RQAPGKGLEWVARIRSKYNNYATYYADAVKDRFTISRDDSKNTVYLQ |
| | | | | MNNLKTEDTAVYYCARAGNFGSSYISYWAYWGQGTLVTVSSGGGGS |
| | | | | GGGGSGGGGSQTVVTQEPSLTVSPGGTVTITCGSSTGAVTSGNYPNWV |
| | | | | QKKPGQAPRGLIGGTKFLAPGTPARFSGSLSGGKAALTLSGVQPEDEAE |
| | | | | YYCVLWYSNRWVFGSGTKLTVL |
| 175. | BiTE HLE (I2C) | arti- | aa | QVQLVQSGGEVKKPGASVKVSCKASGYTFTSYGISWVRQAPGQCLEW |
| | | ficial | | MGWISPQTGNAIYAQKLQGRVTMTRDTSTSTAYMELRSLRSDDTAVY |
| | | | | YCARDPDYYGSGSYSDYWGQGTLVTVSSGGGGSGGGGSGGGGSEIVL |
| | | | | TQSPATLSVSPGERATLSCRASQSVSSNLAWYQQKPGQAPRLLIYGASS |
| | | | | RATGIPARFSGSGSGTEFTLTISSLQSEDFAVYYCQQYHSWPLLTFGCGT |
| | | | | KVEIKSGGGGSEVQLVESGGGLVQPGGSLKLSCAASGFTFNKYAMNW |
| | | | | VRQAPGKGLEWVARIRSKYNNYATYYADSVKDRFTISRDDSKNTAYL |
| | | | | QMNNLKTEDTAVYYCVRHGNFGNSYISYWAYWGQGTLVTVSSGGGG |
| | | | | SGGGGSGGGGSQTVVTQEPSLTVSPGGTVTLTCGSSTGAVTSGNYPNW |
| | | | | VQQKPGQAPRGLIGGTKFLAPGTPARFSGSLLGGKAALTLSGVQPEDE |
| | | | | AEYYCVLWYSNRWVFGGGTKLTVLGGGGDKTHTCPPCPAPELLGGPS |
| | | | | VFLFPPKPKDTLMISRTPEVTCVVVDVSHEDPEVKFNWYVDGVEVHN |
| | | | | AKTKPCEEQYGSTYRCVSVLTVLHQDWLNGKEYKCKVSNKALPAPIE |
| | | | | KTISKAKGQPREPQVYTLPPSREEMTKNQVSLTCLVKGFYPSDIAVEWE |
| | | | | SNGQPENNYKTTPPVLDSDGSFFLYSKLTVDKSRWQQGNVFSCSVMH |
| | | | | EALHNHYTQKSLSLSPGKGGGGSGGGGSGGGGSGGGGSGGGGSGGG |
| | | | | GSDKTHTCPPCPAPELLGGPSVFLFPPKPKDTLMISRTPEVTCVVVDVS |
| | | | | HEDPEVKFNWYVDGVEVHNAKTKPCEEQYGSTYRCVSVLTVLHQDW |
| | | | | LNGKEYKCKVSNKALPAPIEKTISKAKGQPREPQVYTLPPSREEMTKN |
| | | | | QVSLTCLVKGFYPSDIAVEWESNGQPENNYKTTPPVLDSDGSFFLYSKL |
| | | | | TVDKSRWQQGNVFSCSVMHEALHNHYTQKSLSLSPGK |
| 176. | BiTE HLE (I2E) | arti- | aa | QVQLVQSGGEVKKPGASVKVSCKASGYTFTSYGISWVRQAPGQCLEW |
| | | ficial | | MGWISPQTGNAIYAQKLQGRVTMTRDTSTSTAYMELRSLRSDDTAVY |
| | | | | YCARDPDYYGSGSYSDYWGQGTLVTVSSGGGGSGGGGSGGGGSEIVL |
| | | | | TQSPATLSVSPGERATLSCRASQSVSSNLAWYQQKPGQAPRLLIYGASS |
| | | | | RATGIPARFSGSGSGTEFTLTISSLQSEDFAVYYCQQYHSWPLLTFGCGT |
| | | | | KVEIKSGGGGSEVQLVESGGGLVQPGGSLKLSCAASGFTFNKYAINWV |
| | | | | RQAPGKGLEWVARIRSKYNNYATYYADAVKDRFTISRDDSKNTVYLQ |
| | | | | MNNLKTEDTAVYYCARAGNFGSSYISYWAYWGQGTLVTVSSGGGGS |
| | | | | GGGGSGGGGSQTVVTQEPSLTVSPGGTVTITCGSSTGAVTSGNYPNWV |
| | | | | QKKPGQAPRGLIGGTKFLAPGTPARFSGSLSGGKAALTLSGVQPEDEAE |
| | | | | YYCVLWYSNRWVFGSGTKLTVLGGGGDKTHTCPPCPAPELLGGPSVF |
| | | | | LFPPKPKDTLMISRTPEVTCVVVDVSHEDPEVKFNWYVDGVEVHNAK |
| | | | | TKPCEEQYGSTYRCVSVLTVLHQDWLNGKEYKCKVSNKALPAPIEKTI |
| | | | | SKAKGQPREPQVYTLPPSREEMTKNQVSLTCLVKGFYPSDIAVEWESN |
| | | | | GQPENNYKTTPPVLDSDGSFFLYSKLTVDKSRWQQGNVFSCSVMHEA |
| | | | | LHNHYTQKSLSLSPGKGGGGSGGGGSGGGGSGGGGSGGGGSGGGGSD |
| | | | | KTHTCPPCPAPELLGGPSVFLFPPKPKDTLMISRTPEVTCVVVDVSHEDP |
| | | | | EVKFNWYVDGVEVHNAKTKPCEEQYGSTYRCVSVLTVLHQDWLNGK |
| | | | | EYKCKVSNKALPAPIEKTISKAKGQPREPQVYTLPPSREEMTKNQVSLT |
| | | | | CLVKGFYPSDIAVEWESNGQPENNYKTTPPVLDSDGSFFLYSKLTVDK |
| | | | | SRWQQGNVFSCSVMHEALHNHYTQKSLSLSPGK |
| 177. | HCDR1 CD22 44- | arti- | aa | SYGIS |
| | A8 CC | ficial | | |
| 178. | HCDR2 | arti- | aa | WISAYNGNAIYAQKLQG |
| | | ficial | | |
| 179. | HCDR3 | arti- | aa | DPDYYGSGSYSDY |
| | | ficial | | |
| 180. | LCDR1 | arti- | aa | RASQSVSSNLA |
| | | ficial | | |
| 181. | LCDR2 | arti- | aa | GASSRAT |
| | | ficial | | |
| 182. | LCDR3 | arti- | aa | QQYHSWPILH |
| | | ficial | | |
| 183. | VH | arti- | aa | QVQLVQSGAEVKKPGASVKVSCKASGYTFTSYGISWVRQAPGQCLEW |
| | | ficial | | MGWISAYNGNAIYAQKLQGRVTMTRDTSTSTAYMELRSLRSDDTAVY |
| | | | | YCARDPDYYGSGSYSDYWGQGTLVTVSS |
| 184. | VL | arti- | aa | EIVLTQSPATLSVSPGERATLSCRASQSVSSNLAWYQQKPGQAPRLLIY |
| | | ficial | | GASSRATGIPARFSGSGSGTEFTLTISSLQSEDFAVYYCQQYHSWPILHF |
| | | | | GCGTKVEIK |
| 185. | scFv | arti- | aa | QVQLVQSGAEVKKPGASVKVSCKASGYTFTSYGISWVRQAPGQCLEW |
| | | ficial | | MGWISAYNGNAIYAQKLQGRVTMTRDTSTSTAYMELRSLRSDDTAVY |
| | | | | YCARDPDYYGSGSYSDYWGQGTLVTVSSGGGGSGGGGSGGGGSEIVL |
| | | | | TQSPATLSVSPGERATLSCRASQSVSSNLAWYQQKPGQAPRLLIYGASS |
| | | | | RATGIPARFSGSGSGTEFTLTISSLQSEDFAVYYCQQYHSWPILHFGCGT |
| | | | | KVEIK |
| 186. | BISPECIFIC | arti- | aa | QVQLVQSGAEVKKPGASVKVSCKASGYTFTSYGISWVRQAPGQCLEW |
| | MOL. (I2C) | ficial | | MGWISAYNGNAIYAQKLQGRVTMTRDTSTSTAYMELRSLRSDDTAVY |
| | | | | YCARDPDYYGSGSYSDYWGQGTLVTVSSGGGGSGGGGSGGGGSEIVL |
| | | | | TQSPATLSVSPGERATLSCRASQSVSSNLAWYQQKPGQAPRLLIYGASS |
| | | | | RATGIPARFSGSGSGTEFTLTISSLQSEDFAVYYCQQYHSWPILHFGCGT |
| | | | | KVEIKSGGGGSEVQLVESGGGLVQPGGSLKLSCAASGFTFNKYAMNW |
| | | | | VRQAPGKGLEWVARIRSKYNNYATYYADSVKDRFTISRDDSKNTAYL |
| | | | | QMNNLKTEDTAVYYCVRHGNFGNSYISYWAYWGQGTLVTVSSGGGG |
| | | | | SGGGGSGGGGSQTVVTQEPSLTVSPGGTVTLTCGSSTGAVTSGNYPNW |
| | | | | VQQKPGQAPRGLIGGTKFLAPGTPARFSGSLLGGKAALTLSGVQPEDE |
| | | | | AEYYCVLWYSNRWVFGGGTKLTVL |
| 187. | BISPECIFIC | arti- | aa | QVQLVQSGAEVKKPGASVKVSCKASGYTFTSYGISWVRQAPGQCLEW |
| | MOL. (I2E) | ficial | | MGWISAYNGNAIYAQKLQGRVTMTRDTSTSTAYMELRSLRSDDTAVY |
| | | | | YCARDPDYYGSGSYSDYWGQGTLVTVSSGGGGSGGGGGGGGSEIVL |
| | | | | TQSPATLSVSPGERATLSCRASQSVSSNLAWYQQKPGQAPRLLIYGASS |
| | | | | RATGIPARFSGSGSGTEFTLTISSLQSEDFAVYYCQQYHSWPILHFGCGT |
| | | | | KVEIKSGGGGSEVQLVESGGGLVQPGGSLKLSCAASGFTFNKYAINWV |
| | | | | RQAPGKGLEWVARIRSKYNNYATYYADAVKDRFTISRDDSKNTVYLQ |
| | | | | MNNLKTEDTAVYYCARAGNFGSSYISYWAYWGQGTLVTVSSGGGGS |
| | | | | GGGGSGGGGSQTVVTQEPSLTVSPGGTVTITCGSSTGAVTSGNYPNWV |
| | | | | QKKPGQAPRGLIGGTKFLAPGTPARFSGSLSGGKAALTLSGVQPEDEAE |
| | | | | YYCVLWYSNRWVFGSGTKLTVL |
| 188. | BiTE HLE (I2C) | arti- | aa | QVQLVQSGAEVKKPGASVKVSCKASGYTFTSYGISWVRQAPGQCLEW |
| | | ficial | | MGWISAYNGNAIYAQKLQGRVTMTRDTSTSTAYMELRSLRSDDTAVY |
| | | | | YCARDPDYYGSGSYSDYWGQGTLVTVSSGGGGSGGGGSGGGGSEIVL |
| | | | | TQSPATLSVSPGERATLSCRASQSVSSNLAWYQQKPGQAPRLLIYGASS |
| | | | | RATGIPARFSGSGSGTEFTLTISSLQSEDFAVYYCQQYHSWPILHFGCGT |
| | | | | KVEIKSGGGGSEVQLVESGGGLVQPGGSLKLSCAASGFTFNKYAMNW |
| | | | | VRQAPGKGLEWVARIRSKYNNYATYYADSVKDRFTISRDDSKNTAYL |
| | | | | QMNNLKTEDTAVYYCVRHGNFGNSYISYWAYWGQGTLVTVSSGGGG |
| | | | | SGGGGSGGGGSQTVVTQEPSLTVSPGGTVTLTCGSSTGAVTSGNYPNW |
| | | | | VQQKPGQAPRGLIGGTKFLAPGTPARFSGSLLGGKAALTLSGVQPEDE |
| | | | | AEYYCVLWYSNRWVFGGGTKLTVLGGGGDKTHTCPPCPAPELLGGPS |
| | | | | VFLFPPKPKDTLMISRTPEVTCVVVDVSHEDPEVKFNWYVDGVEVHN |
| | | | | AKTKPCEEQYGSTYRCVSVLTVLHQDWLNGKEYKCKVSNKALPAPIE |
| | | | | KTISKAKGQPREPQVYTLPPSREEMTKNQVSLTCLVKGFYPSDIAVEWE |
| | | | | SNGQPENNYKTTPPVLDSDGSFFLYSKLTVDKSRWQQGNVFSCSVMH |
| | | | | EALHNHYTQKSLSLSPGKGGGGSGGGGSGGGGSGGGGSGGGGSGGG |
| | | | | GSDKTHTCPPCPAPELLGGPSVFLFPPKPKDTLMISRTPEVTCVVVDVS |
| | | | | HEDPEVKFNWYVDGVEVHNAKTKPCEEQYGSTYRCVSVLTVLHQDW |
| | | | | LNGKEYKCKVSNKALPAPIEKTISKAKGQPREPQVYTLPPSREEMTKN |
| | | | | QVSLTCLVKGFYPSDIAVEWESNGQPENNYKTTPPVLDSDGSFFLYSKL |
| | | | | TVDKSRWQQGNVFSCSVMHEALHNHYTQKSLSLSPGK |
| 189. | BiTE HLE (I2E) | arti- | aa | QVQLVQSGAEVKKPGASVKVSCKASGYTFTSYGISWVRQAPGQCLEW |
| | | ficial | | MGWISAYNGNAIYAQKLQGRVTMTRDTSTSTAYMELRSLRSDDTAVY |
| | | | | YCARDPDYYGSGSYSDYWGQGTLVTVSSGGGGSGGGGSGGGGSEIVL |
| | | | | TQSPATLSVSPGERATLSCRASQSVSSNLAWYQQKPGQAPRLLIYGASS |
| | | | | RATGIPARFSGSGSGTEFTLTISSLQSEDFAVYYCQQYHSWPILHFGCGT |
| | | | | KVEIKSGGGGSEVQLVESGGGLVQPGGSLKLSCAASGFTFNKYAINWV |
| | | | | RQAPGKGLEWVARIRSKYNNYATYYADAVKDRFTISRDDSKNTVYLQ |
| | | | | MNNLKTEDTAVYYCARAGNFGSSYISYWAYWGQGTLVTVSSGGGGS |
| | | | | GGGGSGGGGSQTVVTQEPSLTVSPGGTVTITCGSSTGAVTSGNYPNWV |
| | | | | QKKPGQAPRGLIGGTKFLAPGTPARFSGSLSGGKAALTLSGVQPEDEAE |
| | | | | YYCVLWYSNRWVFGSGTKLTVLGGGGDKTHTCPPCPAPELLGGPSVF |
| | | | | LFPPKPKDTLMISRTPEVTCVVVDVSHEDPEVKFNWYVDGVEVHNAK |
| | | | | TKPCEEQYGSTYRCVSVLTVLHQDWLNGKEYKCKVSNKALPAPIEKTI |
| | | | | SKAKGQPREPQVYTLPPSREEMTKNQVSLTCLVKGFYPSDIAVEWESN |
| | | | | GQPENNYKTTPPVLDSDGSFFLYSKLTVDKSRWQQGNVFSCSVMHEA |
| | | | | LHNHYTQKSLSLSPGKGGGGSGGGGSGGGGSGGGGSGGGGSGGGGSD |
| | | | | KTHTCPPCPAPELLGGPSVFLFPPKPKDTLMISRTPEVTCVVVDVSHEDP |
| | | | | EVKFNWYVDGVEVHNAKTKPCEEQYGSTYRCVSVLTVLHQDWLNGK |
| | | | | EYKCKVSNKALPAPIEKTISKAKGQPREPQVYTLPPSREEMTKNQVSLT |
| | | | | CLVKGFYPSDIAVEWESNGQPENNYKTTPPVLDSDGSFFLYSKLTVDK |
| | | | | SRWQQGNVFSCSVMHEALHNHYTQKSLSLSPGK |
| 190. | HCDR1 CD22 53- | arti- | aa | SYGIT |
| | D6 CC | ficial | | |
| 191. | HCDR2 | arti- | aa | WISAYNGNTIYAQKLQG |
| | | ficial | | |
| 192. | HCDR3 | arti- | aa | DSNHEDF |
| | | ficial | | |
| 193. | LCDR1 | arti- | aa | RASQSVSSNLA |
| | | ficial | | |
| 194. | LCDR2 | arti- | aa | GASTRAT |
| | | ficial | | |
| 195. | LCDR3 | arti- | aa | QQYHTWPPVT |
| | | ficial | | |
| 196. | VH | arti- | aa | QVQLVQSGAEVKKPGASVKVSCKASGYSFTSYGITWVRQAPGQCLEW |
| | | ficial | | MGWISAYNGNTIYAQKLQGRVTMTTDTSTSTAYMELRSLRSDDTAVY |
| | | | | YCVRDSNHEDFWGQGTLVTVSS |
| 197. | VL | arti- | aa | EIVLTQSPATLSVSPGERATLSCRASQSVSSNLAWYQQKPGQAPRLLIY |
| | | ficial | | GASTRATGIPARFSGSGSGTEFTLTISSLQSEDFAVYYCQQYHTWPPVTF |
| | | | | GCGTKVEIK |
| 198. | scFv | arti- | aa | QVQLVQSGAEVKKPGASVKVSCKASGYSFTSYGITWVRQAPGQCLEW |
| | | ficial | | MGWISAYNGNTIYAQKLQGRVTMTTDTSTSTAYMELRSLRSDDTAVY |
| | | | | YCVRDSNHEDFWGQGTLVTVSSGGGGSGGGGSGGGGSEIVLTQSPAT |
| | | | | LSVSPGERATLSCRASQSVSSNLAWYQQKPGQAPRLLIYGASTRATGIP |
| | | | | ARFSGSGSGTEFTLTISSLQSEDFAVYYCQQYHTWPPVTFGCGTKVEIK |
| 199. | BISPECIFIC | arti- | aa | QVQLVQSGAEVKKPGASVKVSCKASGYSFTSYGITWVRQAPGQCLEW |
| | MOL. (I2C) | ficial | | MGWISAYNGNTIYAQKLQGRVTMTTDTSTSTAYMELRSLRSDDTAVY |
| | | | | YCVRDSNHEDFWGQGTLVTVSSGGGGSGGGGSGGGGSEIVLTQSPAT |
| | | | | LSVSPGERATLSCRASQSVSSNLAWYQQKPGQAPRLLIYGASTRATGIP |
| | | | | ARFSGSGSGTEFTLTISSLQSEDFAVYYCQQYHTWPPVTFGCGTKVEIK |
| | | | | SGGGGSEVQLVESGGGLVQPGGSLKLSCAASGFTFNKYAMNWVRQAP |
| | | | | GKGLEWVARIRSKYNNYATYYADSVKDRFTISRDDSKNTAYLQMNNL |
| | | | | KTEDTAVYYCVRHGNFGNSYISYWAYWGQGTLVTVSSGGGGSGGGG |
| | | | | SGGGGSQTVVTQEPSLTVSPGGTVTLTCGSSTGAVTSGNYPNWVQQKP |
| | | | | GQAPRGLIGGTKFLAPGTPARFSGSLLGGKAALTLSGVQPEDEAEYYC |
| | | | | VLWYSNRWVFGGGTKLTVL |
| 200. | BISPECIFIC | arti- | aa | QVQLVQSGAEVKKPGASVKVSCKASGYSFTSYGITWVRQAPGQCLEW |
| | MOL. (I2E) | ficial | | MGWISAYNGNTIYAQKLQGRVTMTTDTSTSTAYMELRSLRSDDTAVY |
| | | | | YCVRDSNHEDFWGQGTLVTVSSGGGGSGGGGSGGGGSEIVLTQSPAT |
| | | | | LSVSPGERATLSCRASQSVSSNLAWYQQKPGQAPRLLIYGASTRATGIP |
| | | | | ARFSGSGSGTEFTLTISSLQSEDFAVYYCQQYHTWPPVTFGCGTKVEIK |
| | | | | SGGGGSEVQLVESGGGLVQPGGSLKLSCAASGFTFNKYAINWVRQAP |
| | | | | GKGLEWVARIRSKYNNYATYYADAVKDRFTISRDDSKNTVYLQMNN |
| | | | | LKTEDTAVYYCARAGNFGSSYISYWAYWGQGTLVTVSSGGGGSGGG |
| | | | | GSGGGGSQTVVTQEPSLTVSPGGTVTITCGSSTGAVTSGNYPNWVQKK |
| | | | | PGQAPRGLIGGTKFLAPGTPARFSGSLSGGKAALTLSGVQPEDEAEYYC |
| | | | | VLWYSNRWVFGSGTKLTVL |
| 201. | BiTE HLE (I2C) | arti- | aa | QVQLVQSGAEVKKPGASVKVSCKASGYSFTSYGITWVRQAPGQCLEW |
| | | ficial | | MGWISAYNGNTIYAQKLQGRVTMTTDTSTSTAYMELRSLRSDDTAVY |
| | | | | YCVRDSNHEDFWGQGTLVTVSSGGGGSGGGGSGGGGSEIVLTQSPAT |
| | | | | LSVSPGERATLSCRASQSVSSNLAWYQQKPGQAPRLLIYGASTRATGIP |
| | | | | ARFSGSGSGTEFTLTISSLQSEDFAVYYCQQYHTWPPVTFGCGTKVEIK |
| | | | | SGGGGSEVQLVESGGGLVQPGGSLKLSCAASGFTFNKYAMNWVRQAP |
| | | | | GKGLEWVARIRSKYNNYATYYADSVKDRFTISRDDSKNTAYLQMNNL |
| | | | | KTEDTAVYYCVRHGNFGNSYISYWAYWGQGTLVTVSSGGGGSGGGG |
| | | | | SGGGGSQTVVTQEPSLTVSPGGTVTLTCGSSTGAVTSGNYPNWVQQKP |
| | | | | GQAPRGLIGGTKFLAPGTPARFSGSLLGGKAALTLSGVQPEDEAEYYC |
| | | | | VLWYSNRWVFGGGTKLTVLGGGGDKTHTCPPCPAPELLGGPSVFLFPP |
| | | | | KPKDTLMISRTPEVTCVVVDVSHEDPEVKFNWYVDGVEVHNAKTKPC |
| | | | | EEQYGSTYRCVSVLTVLHQDWLNGKEYKCKVSNKALPAPIEKTISKAK |
| | | | | GQPREPQVYTLPPSREEMTKNQVSLTCLVKGFYPSDIAVEWESNGQPE |
| | | | | NNYKTTPPVLDSDGSFFLYSKLTVDKSRWQQGNVFSCSVMHEALHNH |
| | | | | YTQKSLSLSPGKGGGGSGGGGSGGGGSGGGGSGGGGSGGGGSDKTHT |
| | | | | CPPCPAPELLGGPSVFLFPPKPKDTLMISRTPEVTCVVVDVSHEDPEVKF |
| | | | | NWYVDGVEVHNAKTKPCEEQYGSTYRCVSVLTVLHQDWLNGKEYKC |
| | | | | KVSNKALPAPIEKTISKAKGQPREPQVYTLPPSREEMTKNQVSLTCLVK |
| | | | | GFYPSDIAVEWESNGQPENNYKTTPPVLDSDGSFFLYSKLTVDKSRWQ |
| | | | | QGNVFSCSVMHEALHNHYTQKSLSLSPGK |
| 202. | BiTE HLE (I2E) | arti- | aa | QVQLVQSGAEVKKPGASVKVSCKASGYSFTSYGITWVRQAPGQCLEW |
| | | ficial | | MGWISAYNGNTIYAQKLQGRVTMTTDTSTSTAYMELRSLRSDDTAVY |
| | | | | YCVRDSNHEDFWGQGTLVTVSSGGGGSGGGGSGGGGSEIVLTQSPAT |
| | | | | LSVSPGERATLSCRASQSVSSNLAWYQQKPGQAPRLLIYGASTRATGIP |
| | | | | ARFSGSGSGTEFTLTISSLQSEDFAVYYCQQYHTWPPVTFGCGTKVEIK |
| | | | | SGGGGSEVQLVESGGGLVQPGGSLKLSCAASGFTFNKYAINWVRQAP |
| | | | | GKGLEWVARIRSKYNNYATYYADAVKDRFTISRDDSKNTVYLQMNN |
| | | | | LKTEDTAVYYCARAGNFGSSYISYWAYWGQGTLVTVSSGGGGSGGG |
| | | | | GSGGGGSQTVVTQEPSLTVSPGGTVTITCGSSTGAVTSGNYPNWVQKK |
| | | | | PGQAPRGLIGGTKFLAPGTPARFSGSLSGGKAALTLSGVQPEDEAEYYC |
| | | | | VLWYSNRWVFGSGTKLTVLGGGGDKTHTCPPCPAPELLGGPSVFLFPP |
| | | | | KPKDTLMISRTPEVTCVVVDVSHEDPEVKFNWYVDGVEVHNAKTKPC |
| | | | | EEQYGSTYRCVSVLTVLHQDWLNGKEYKCKVSNKALPAPIEKTISKAK |
| | | | | GQPREPQVYTLPPSREEMTKNQVSLTCLVKGFYPSDIAVEWESNGQPE |
| | | | | NNYKTTPPVLDSDGSFFLYSKLTVDKSRWQQGNVFSCSVMHEALHNH |
| | | | | YTQKSLSLSPGKGGGGSGGGGSGGGGSGGGGSGGGGSGGGGSDKTHT |
| | | | | CPPCPAPELLGGPSVFLFPPKPKDTLMISRTPEVTCVVVDVSHEDPEVKF |
| | | | | NWYVDGVEVHNAKTKPCEEQYGSTYRCVSVLTVLHQDWLNGKEYKC |
| | | | | KVSNKALPAPIEKTISKAKGQPREPQVYTLPPSREEMTKNQVSLTCLVK |
| | | | | GFYPSDIAVEWESNGQPENNYKTTPPVLDSDGSFFLYSKLTVDKSRWQ |
| | | | | QGNVFSCSVMHEALHNHYTQKSLSLSPGK |
| 203. | HCDR1 CD22 53- | arti- | aa | SYGIS |
| | G9 CC | ficial | | |
| 204. | HCDR2 | arti- | aa | WISAYNGNTIYAQKLQG |
| | | ficial | | |
| 205. | HCDR3 | arti- | aa | DPGVTGDDY |
| | | ficial | | |
| 206. | LCDR1 | arti- | aa | RASLSVSSNLA |
| | | ficial | | |
| 207. | LCDR2 | arti- | aa | GASTRAT |
| | | ficial | | |
| 208. | LCDR3 | arti- | aa | QQYHSWPALT |
| | | ficial | | |
| 209. | VH | arti- | aa | QVQLVQSGAEVKKPGESLKISCKGSGYSFTSYGISWVRQAPGQCLEW |
| | | ficial | | MGWISAYNGNTIYAQKLQGRVTMTTDTSTSTAYMELRRLRSDDTAVY |
| | | | | YCARDPGVTGDDYWGQGTLVTVSS |
| 210. | VL | arti- | aa | EIVLTQSPATLSVSPGERATLSCRASLSVSSNLAWYQQKPGQAPRLLIY |
| | | ficial | | GASTRATGIPARFSGSGSGTEFTLTISSLQSEDFAVYFCQQYHSWPALTF |
| | | | | GCGTKVEIK |
| 211. | scFv | arti- | aa | QVQLVQSGAEVKKPGESLKISCKGSGYSFTSYGISWVRQAPGQCLEW |
| | | ficial | | MGWISAYNGNTIYAQKLQGRVTMTTDTSTSTAYMELRRLRSDDTAVY |
| | | | | YCARDPGVTGDDYWGQGTLVTVSSGGGGSGGGGSGGGGSEIVLTQSP |
| | | | | ATLSVSPGERATLSCRASLSVSSNLAWYQQKPGQAPRLLIYGASTRAT |
| | | | | GIPARFSGSGSGTEFTLTISSLQSEDFAVYFCQQYHSWPALTFGCGTKVE |
| | | | | IK |
| 212. | BISPECIFIC | arti- | aa | QVQLVQSGAEVKKPGESLKISCKGSGYSFTSYGISWVRQAPGQCLEW |
| | MOL. (I2C) | ficial | | MGWISAYNGNTIYAQKLQGRVTMTTDTSTSTAYMELRRLRSDDTAVY |
| | | | | YCARDPGVTGDDYWGQGTLVTVSSGGGGSGGGGSGGGGSEIVLTQSP |
| | | | | ATLSVSPGERATLSCRASLSVSSNLAWYQQKPGQAPRLLIYGASTRAT |
| | | | | GIPARFSGSGSGTEFTLTISSLQSEDFAVYFCQQYHSWPALTFGCGTKVE |
| | | | | IKSGGGGSEVQLVESGGGLVQPGGSLKLSCAASGFTFNKYAMNWVRQ |
| | | | | APGKGLEWVARIRSKYNNYATYYADSVKDRFTISRDDSKNTAYLQMN |
| | | | | NLKTEDTAVYYCVRHGNFGNSYISYWAYWGQGTLVTVSSGGGGSGG |
| | | | | GGSGGGGSQTVVTQEPSLTVSPGGTVTLTCGSSTGAVTSGNYPNWVQ |
| | | | | QKPGQAPRGLIGGTKFLAPGTPARFSGSLLGGKAALTLSGVQPEDEAE |
| | | | | YYCVLWYSNRWVFGGGTKLTVL |
| 213. | BISPECIFIC | arti- | aa | QVQLVQSGAEVKKPGESLKISCKGSGYSFTSYGISWVRQAPGQCLEW |
| | MOL. (I2E) | ficial | | MGWISAYNGNTIYAQKLQGRVTMTTDTSTSTAYMELRRLRSDDTAVY |
| | | | | YCARDPGVTGDDYWGQGTLVTVSSGGGGSGGGGSGGGGSEIVLTQSP |
| | | | | ATLSVSPGERATLSCRASLSVSSNLAWYQQKPGQAPRLLIYGASTRAT |
| | | | | GIPARFSGSGSGTEFTLTISSLQSEDFAVYFCQQYHSWPALTFGCGTKVE |
| | | | | IKSGGGGSEVQLVESGGGLVQPGGSLKLSCAASGFTFNKYAINWVRQA |
| | | | | PGKGLEWVARIRSKYNNYATYYADAVKDRFTISRDDSKNTVYLQMNN |
| | | | | LKTEDTAVYYCARAGNFGSSYISYWAYWGQGTLVTVSSGGGGSGGG |
| | | | | GSGGGGSQTVVTQEPSLTVSPGGTVTITCGSSTGAVTSGNYPNWVQKK |
| | | | | PGQAPRGLIGGTKFLAPGTPARFSGSLSGGKAALTLSGVQPEDEAEYYC |
| | | | | VLWYSNRWVFGSGTKLTVL |
| 214. | BiTE HLE (I2C) | arti- | aa | QVQLVQSGAEVKKPGESLKISCKGSGYSFTSYGISWVRQAPGQCLEW |
| | | ficial | | MGWISAYNGNTIYAQKLQGRVTMTTDTSTSTAYMELRRLRSDDTAVY |
| | | | | YCARDPGVTGDDYWGQGTLVTVSSGGGGSGGGGSGGGGSEIVLTQSP |
| | | | | ATLSVSPGERATLSCRASLSVSSNLAWYQQKPGQAPRLLIYGASTRAT |
| | | | | GIPARFSGSGSGTEFTLTISSLQSEDFAVYFCQQYHSWPALTFGCGTKVE |
| | | | | IKSGGGGSEVQLVESGGGLVQPGGSLKLSCAASGFTFNKYAMNWVRQ |
| | | | | APGKGLEWVARIRSKYNNYATYYADSVKDRFTISRDDSKNTAYLQMN |
| | | | | NLKTEDTAVYYCVRHGNFGNSYISYWAYWGQGTLVTVSSGGGGSGG |
| | | | | GGSGGGGSQTVVTQEPSLTVSPGGTVTLTCGSSTGAVTSGNYPNWVQ |
| | | | | QKPGQAPRGLIGGTKFLAPGTPARFSGSLLGGKAALTLSGVQPEDEAE |
| | | | | YYCVLWYSNRWVFGGGTKLTVLGGGGDKTHTCPPCPAPELLGGPSVF |
| | | | | LFPPKPKDTLMISRTPEVTCVVVDVSHEDPEVKFNWYVDGVEVHNAK |
| | | | | TKPCEEQYGSTYRCVSVLTVLHQDWLNGKEYKCKVSNKALPAPIEKTI |
| | | | | SKAKGQPREPQVYTLPPSREEMTKNQVSLTCLVKGFYPSDIAVEWESN |
| | | | | GQPENNYKTTPPVLDSDGSFFLYSKLTVDKSRWQQGNVFSCSVMHEA |
| | | | | LHNHYTQKSLSLSPGKGGGGSGGGGSGGGGSGGGGSGGGGSGGGGSD |
| | | | | KTHTCPPCPAPELLGGPSVFLFPPKPKDTLMISRTPEVTCVVVDVSHEDP |
| | | | | EVKFNWYVDGVEVHNAKTKPCEEQYGSTYRCVSVLTVLHQDWLNGK |
| | | | | EYKCKVSNKALPAPIEKTISKAKGQPREPQVYTLPPSREEMTKNQVSLT |
| | | | | CLVKGFYPSDIAVEWESNGQPENNYKTTPPVLDSDGSFFLYSKLTVDK |
| | | | | SRWQQGNVFSCSVMHEALHNHYTQKSLSLSPGK |
| 215. | BiTE HLE (I2E) | arti- | aa | QVQLVQSGAEVKKPGESLKISCKGSGYSFTSYGISWVRQAPGQCLEW |
| | | ficial | | MGWISAYNGNTIYAQKLQGRVTMTTDTSTSTAYMELRRLRSDDTAVY |
| | | | | YCARDPGVTGDDYWGQGTLVTVSSGGGGSGGGGSGGGGSEIVLTQSP |
| | | | | ATLSVSPGERATLSCRASLSVSSNLAWYQQKPGQAPRLLIYGASTRAT |
| | | | | GIPARFSGSGSGTEFTLTISSLQSEDFAVYFCQQYHSWPALTFGCGTKVE |
| | | | | IKSGGGGSEVQLVESGGGLVQPGGSLKLSCAASGFTFNKYAINWVRQA |
| | | | | PGKGLEWVARIRSKYNNYATYYADAVKDRFTISRDDSKNTVYLQMNN |
| | | | | LKTEDTAVYYCARAGNFGSSYISYWAYWGQGTLVTVSSGGGGSGGG |
| | | | | GSGGGGSQTVVTQEPSLTVSPGGTVTITCGSSTGAVTSGNYPNWVQKK |
| | | | | PGQAPRGLIGGTKFLAPGTPARFSGSLSGGKAALTLSGVQPEDEAEYYC |
| | | | | VLWYSNRWVFGSGTKLTVLGGGGDKTHTCPPCPAPELLGGPSVFLFPP |
| | | | | KPKDTLMISRTPEVTCVVVDVSHEDPEVKFNWYVDGVEVHNAKTKPC |
| | | | | EEQYGSTYRCVSVLTVLHQDWLNGKEYKCKVSNKALPAPIEKTISKAK |
| | | | | GQPREPQVYTLPPSREEMTKNQVSLTCLVKGFYPSDIAVEWESNGQPE |
| | | | | NNYKTTPPVLDSDGSFFLYSKLTVDKSRWQQGNVFSCSVMHEALHNH |
| | | | | YTQKSLSLSPGKGGGGSGGGGSGGGGSGGGGSGGGGSGGGGSDKTHT |
| | | | | CPPCPAPELLGGPSVFLFPPKPKDTLMISRTPEVTCVVVDVSHEDPEVKF |
| | | | | NWYVDGVEVHNAKTKPCEEQYGSTYRCVSVLTVLHQDWLNGKEYKC |
| | | | | KVSNKALPAPIEKTISKAKGQPREPQVYTLPPSREEMTKNQVSLTCLVK |
| | | | | GFYPSDIAVEWESNGQPENNYKTTPPVLDSDGSFFLYSKLTVDKSRWQ |
| | | | | QGNVFSCSVMHEALHNHYTQKSLSLSPGK |
| 216. | HCDR1 CD22 99- | arti- | aa | AYGMH |
| | F10 CC | ficial | | |
| 217. | HCDR2 | arti- | aa | VILYDGSNKYYADSVKG |
| | | ficial | | |
| 218. | HCDR3 | arti- | aa | GSGWLQLGDYFDY |
| | | ficial | | |
| 219. | LCDR1 | arti- | aa | TGTSSDVGGYNYVS |
| | | ficial | | |
| 220. | LCDR2 | arti- | aa | EVSNRPS |
| | | ficial | | |
| 221. | LCDR3 | arti- | aa | SSYTSSSTLV |
| | | ficial | | |
| 222. | VH | arti- | aa | QVQLVESGGGVVQPGRSLRLSCAASGFTFSAYGMHWVRQAPGKCLE |
| | | ficial | | WVAVILYDGSNKYYADSVKGRFTISRDNSKNTLYLQMNSLRAEDTAV |
| | | | | YYCARGSGWLQLGDYFDYWGQGTLVTVSS |
| 223. | VL | arti- | aa | QSALTQPPSVSGSPGQSITISCTGTSSDVGGYNYVSWYQQHPGKAPKL |
| | | ficial | | MIYEVSNRPSGVSNRFSGSKSGNTASLTISGLQAEDEADYYCSSYTSSST |
| | | | | LVFGCGTKLTVL |
| 224. | scFv | arti- | aa | QVQLVESGGGVVQPGRSLRLSCAASGFTFSAYGMHWVRQAPGKCLE |
| | | ficial | | WVAVILYDGSNKYYADSVKGRFTISRDNSKNTLYLQMNSLRAEDTAV |
| | | | | YYCARGSGWLQLGDYFDYWGQGTLVTVSSGGGGSGGGGSGGGGSQS |
| | | | | ALTQPPSVSGSPGQSITISCTGTSSDVGGYNYVSWYQQHPGKAPKLMIY |
| | | | | EVSNRPSGVSNRFSGSKSGNTASLTISGLQAEDEADYYCSSYTSSSTLVF |
| | | | | GCGTKLTVL |
| 225. | BISPECIFIC | arti- | aa | QVQLVESGGGVVQPGRSLRLSCAASGFTFSAYGMHWVRQAPGKCLE |
| | MOL. (I2C) | ficial | | WVAVILYDGSNKYYADSVKGRFTISRDNSKNTLYLQMNSLRAEDTAV |
| | | | | YYCARGSGWLQLGDYFDYWGQGTLVTVSSGGGGSGGGGSGGGGSQS |
| | | | | ALTQPPSVSGSPGQSITISCTGTSSDVGGYNYVSWYQQHPGKAPKLMIY |
| | | | | EVSNRPSGVSNRFSGSKSGNTASLTISGLQAEDEADYYCSSYTSSSTLVF |
| | | | | GCGTKLTVLSGGGGSEVQLVESGGGLVQPGGSLKLSCAASGFTFNKYA |
| | | | | MNWVRQAPGKGLEWVARIRSKYNNYATYYADSVKDRFTISRDDSKN |
| | | | | TAYLQMNNLKTEDTAVYYCVRHGNFGNSYISYWAYWGQGTLVTVSS |
| | | | | GGGGSGGGGSGGGGSQTVVTQEPSLTVSPGGTVTLTCGSSTGAVTSGN |
| | | | | YPNWVQQKPGQAPRGLIGGTKFLAPGTPARFSGSLLGGKAALTLSGVQ |
| | | | | PEDEAEYYCVLWYSNRWVFGGGTKLTVL |
| 226. | BISPECIFIC | arti- | aa | QVQLVESGGGVVQPGRSLRLSCAASGFTFSAYGMHWVRQAPGKCLE |
| | MOL. (I2E) | ficial | | WVAVILYDGSNKYYADSVKGRFTISRDNSKNTLYLQMNSLRAEDTAV |
| | | | | YYCARGSGWLQLGDYFDYWGQGTLVTVSSGGGGSGGGGSGGGGSQS |
| | | | | ALTQPPSVSGSPGQSITISCTGTSSDVGGYNYVSWYQQHPGKAPKLMIY |
| | | | | EVSNRPSGVSNRFSGSKSGNTASLTISGLQAEDEADYYCSSYTSSSTLVF |
| | | | | GCGTKLTVLSGGGGSEVQLVESGGGLVQPGGSLKLSCAASGFTFNKYA |
| | | | | INWVRQAPGKGLEWVARIRSKYNNYATYYADAVKDRFTISRDDSKNT |
| | | | | VYLQMNNLKTEDTAVYYCARAGNFGSSYISYWAYWGQGTLVTVSSG |
| | | | | GGGSGGGGSGGGGSQTVVTQEPSLTVSPGGTVTITCGSSTGAVTSGNY |
| | | | | PNWVQKKPGQAPRGLIGGTKFLAPGTPARFSGSLSGGKAALTLSGVQP |
| | | | | EDEAEYYCVLWYSNRWVFGSGTKLTVL |
| 227. | BiTE HLE (I2C) | arti- | aa | QVQLVESGGGVVQPGRSLRLSCAASGFTFSAYGMHWVRQAPGKCLE |
| | | ficial | | WVAVILYDGSNKYYADSVKGRFTISRDNSKNTLYLQMNSLRAEDTAV |
| | | | | YYCARGSGWLQLGDYFDYWGQGTLVTVSSGGGGSGGGGGGGGSQS |
| | | | | ALTQPPSVSGSPGQSITISCTGTSSDVGGYNYVSWYQQHPGKAPKLMIY |
| | | | | EVSNRPSGVSNRFSGSKSGNTASLTISGLQAEDEADYYCSSYTSSSTLVF |
| | | | | GCGTKLTVLSGGGGSEVQLVESGGGLVQPGGSLKLSCAASGFTFNKYA |
| | | | | MNWVRQAPGKGLEWVARIRSKYNNYATYYADSVKDRFTISRDDSKN |
| | | | | TAYLQMNNLKTEDTAVYYCVRHGNFGNSYISYWAYWGQGTLVTVSS |
| | | | | GGGGSGGGGSGGGGSQTVVTQEPSLTVSPGGTVTLTCGSSTGAVTSGN |
| | | | | YPNWVQQKPGQAPRGLIGGTKFLAPGTPARFSGSLLGGKAALTLSGVQ |
| | | | | PEDEAEYYCVLWYSNRWVFGGGTKLTVLGGGGDKTHTCPPCPAPELL |
| | | | | GGPSVFLFPPKPKDTLMISRTPEVTCVVVDVSHEDPEVKFNWYVDGVE |
| | | | | VHNAKTKPCEEQYGSTYRCVSVLTVLHQDWLNGKEYKCKVSNKALP |
| | | | | APIEKTISKAKGQPREPQVYTLPPSREEMTKNQVSLTCLVKGFYPSDIA |
| | | | | VEWESNGQPENNYKTTPPVLDSDGSFFLYSKLTVDKSRWQQGNVFSCS |
| | | | | VMHEALHNHYTQKSLSLSPGKGGGGSGGGGSGGGGSGGGGSGGGGS |
| | | | | GGGGSDKTHTCPPCPAPELLGGPSVFLFPPKPKDTLMISRTPEVTCVVV |
| | | | | DVSHEDPEVKFNWYVDGVEVHNAKTKPCEEQYGSTYRCVSVLTVLH |
| | | | | QDWLNGKEYKCKVSNKALPAPIEKTISKAKGQPREPQVYTLPPSREEM |
| | | | | TKNQVSLTCLVKGFYPSDIAVEWESNGQPENNYKTTPPVLDSDGSFFL |
| | | | | YSKLTVDKSRWQQGNVFSCSVMHEALHNHYTQKSLSLSPGK |
| 228. | BiTE HLE (I2E) | arti- | aa | QVQLVESGGGVVQPGRSLRLSCAASGFTFSAYGMHWVRQAPGKCLE |
| | | ficial | | WVAVILYDGSNKYYADSVKGRFTISRDNSKNTLYLQMNSLRAEDTAV |
| | | | | YYCARGSGWLQLGDYFDYWGQGTLVTVSSGGGGSGGGGSGGGGSQS |
| | | | | ALTQPPSVSGSPGQSITISCTGTSSDVGGYNYVSWYQQHPGKAPKLMIY |
| | | | | EVSNRPSGVSNRFSGSKSGNTASLTISGLQAEDEADYYCSSYTSSSTLVF |
| | | | | GCGTKLTVLSGGGGSEVQLVESGGGLVQPGGSLKLSCAASGFTFNKYA |
| | | | | INWVRQAPGKGLEWVARIRSKYNNYATYYADAVKDRFTISRDDSKNT |
| | | | | VYLQMNNLKTEDTAVYYCARAGNFGSSYISYWAYWGQGTLVTVSSG |
| | | | | GGGSGGGGSGGGGSQTVVTQEPSLTVSPGGTVTITCGSSTGAVTSGNY |
| | | | | PNWVQKKPGQAPRGLIGGTKFLAPGTPARFSGSLSGGKAALTLSGVQP |
| | | | | EDEAEYYCVLWYSNRWVFGSGTKLTVLGGGGDKTHTCPPCPAPELLG |
| | | | | GPSVFLFPPKPKDTLMISRTPEVTCVVVDVSHEDPEVKFNWYVDGVEV |
| | | | | HNAKTKPCEEQYGSTYRCVSVLTVLHQDWLNGKEYKCKVSNKALPAP |
| | | | | IEKTISKAKGQPREPQVYTLPPSREEMTKNQVSLTCLVKGFYPSDIAVE |
| | | | | WESNGQPENNYKTTPPVLDSDGSFFLYSKLTVDKSRWQQGNVFSCSV |
| | | | | MHEALHNHYTQKSLSLSPGKGGGGSGGGGSGGGGSGGGGSGGGGSG |
| | | | | GGGSDKTHTCPPCPAPELLGGPSVFLFPPKPKDTLMISRTPEVTCVVVD |
| | | | | VSHEDPEVKFNWYVDGVEVHNAKTKPCEEQYGSTYRCVSVLTVLHQ |
| | | | | DWLNGKEYKCKVSNKALPAPIEKTISKAKGQPREPQVYTLPPSREEMT |
| | | | | KNQVSLTCLVKGFYPSDIAVEWESNGQPENNYKTTPPVLDSDGSFFLY |
| | | | | SKLTVDKSRWQQGNVFSCSVMHEALHNHYTQKSLSLSPGK |
| 229. | CD20 82-A3 CC x | arti- | aa | EVQLVESGGGLVQPDRSLRLSCAASGFTFRDYAMHWVRQAPGKCLE |
| | CD22 16-G4 CC | ficial | | WVSGIAWNSDSIGYADSVKGRFTISRDNAKNSLFLQMHSLRPEDTALY |
| | | | | FCAKDTLYGSGSPRAFDIWGQGTMVTVSSGGGGSGGGGSGGGGSEIVL |
| | | | | TQSPATLSVSPGERATLSCRASQSVNNNLAWYQQKPGQAPRLLIYGAS |
| | | | | TRATGIPARFSGSGSGTEFTLTISRLEPEDFAVYYCQQSNNWPITFGCGT |
| | | | | RLEIKSGGGGSQVQLVQSGAEVKKPGASVKVSCKASGYTFTSYGISWV |
| | | | | RQAPGQCLEWMGWISAYNGNTIYAQKFQGRVTLTRDTSTSTAYMELR |
| | | | | SLRSDDTAMYYCARDPDYYGSGSYSDYWGQGTLVTVSSGGGGSGGG |
| | | | | GSGGGGSEIVLTQSPATLSVSPGERATLSCRASQSVSSNLAWYQQKPG |
| | | | | QAPRLLIYGASSRATGIPARFSGSGSGTEFTLTISSLQSEDFAVYYCQQY |
| | | | | HSWPLLTFGCGTKVEIK |
| 230. | CD20 82-A3 CC x | arti- | aa | EVQLVESGGGLVQPDRSLRLSCAASGFTFRDYAMHWVRQAPGKCLE |
| | CD22 16-G4 CC | ficial | | WVSGIAWNSDSIGYADSVKGRFTISRDNAKNSLFLQMHSLRPEDTALY |
| | clipopt | | | FCAKDTLYGSGSPRAFDIWGQGTMVTVSSGGGGQGGGGQGGGGQEIV |
| | | | | LTQSPATLSVSPGERATLSCRASQSVNNNLAWYQQKPGQAPRLLIYGA |
| | | | | STRATGIPARFSGSGSGTEFTLTISRLEPEDFAVYYCQQSNNWPITFGCG |
| | | | | TRLEIKSGGGGQQVQLVQSGAEVKKPGASVKVSCKASGYTFTSYGISW |
| | | | | VRQAPGQCLEWMGWISAYNGNTIYAQKFQGRVTLTRDTSTSTAYMEL |
| | | | | RSLRSDDTAMYYCARDPDYYGSGSYSDYWGQGTLVTVSSGGGGQGG |
| | | | | GGQGGGGQEIVLTQSPATLSVSPGERATLSCRASQSVSSNLAWYQQKP |
| | | | | GQAPRLLIYGASSRATGIPARFSGSGSGTEFTLTISSLQSEDFAVYYCQQ |
| | | | | YHSWPLLTFGCGTKVEIK |
| 231. | CD20 82-A3 CC x | arti- | aa | EVQLVESGGGLVQPDRSLRLSCAASGFTFRDYAMHWVRQAPGKCLE |
| | CD22 16-G4 CC x | ficial | | WVSGIAWNSDSIGYADSVKGRFTISRDNAKNSLFLQMHSLRPEDTALY |
| | I2C | | | FCAKDTLYGSGSPRAFDIWGQGTMVTVSSGGGGSGGGGSGGGGSEIVL |
| | | | | TQSPATLSVSPGERATLSCRASQSVNNNLAWYQQKPGQAPRLLIYGAS |
| | | | | TRATGIPARFSGSGSGTEFTLTISRLEPEDFAVYYCQQSNNWPITFGCGT |
| | | | | RLEIKSGGGGSQVQLVQSGAEVKKPGASVKVSCKASGYTFTSYGISWV |
| | | | | RQAPGQCLEWMGWISAYNGNTIYAQKFQGRVTLTRDTSTSTAYMELR |
| | | | | SLRSDDTAMYYCARDPDYYGSGSYSDYWGQGTLVTVSSGGGGSGGG |
| | | | | GSGGGGSEIVLTQSPATLSVSPGERATLSCRASQSVSSNLAWYQQKPG |
| | | | | QAPRLLIYGASSRATGIPARFSGSGSGTEFTLTISSLQSEDFAVYYCQQY |
| | | | | HSWPLLTFGCGTKVEIKSGGGGSEVQLVESGGGLVQPGGSLKLSCAAS |
| | | | | GFTFNKYAMNWVRQAPGKGLEWVARIRSKYNNYATYYADSVKDRFT |
| | | | | ISRDDSKNTAYLQMNNLKTEDTAVYYCVRHGNFGNSYISYWAYWGQ |
| | | | | GTLVTVSSGGGGSGGGGSGGGGSQTVVTQEPSLTVSPGGTVTLTCGSS |
| | | | | TGAVTSGNYPNWVQQKPGQAPRGLIGGTKFLAPGTPARFSGSLLGGKA |
| | | | | ALTLSGVQPEDEAEYYCVLWYSNRWVFGGGTKLTVL |
| 232. | CD20 82-A3 CC x | arti- | aa | EVQLVESGGGLVQPDRSLRLSCAASGFTFRDYAMHWVRQAPGKCLE |
| | CD22 16-G4 CC x | ficial | | WVSGIAWNSDSIGYADSVKGRFTISRDNAKNSLFLQMHSLRPEDTALY |
| | I2C clipopt | | | FCAKDTLYGSGSPRAFDIWGQGTMVTVSSGGGGQGGGGQGGGGQEIV |
| | | | | LTQSPATLSVSPGERATLSCRASQSVNNNLAWYQQKPGQAPRLLIYGA |
| | | | | STRATGIPARFSGSGSGTEFTLTISRLEPEDFAVYYCQQSNNWPITFGCG |
| | | | | TRLEIKSGGGGQQVQLVQSGAEVKKPGASVKVSCKASGYTFTSYGISW |
| | | | | VRQAPGQCLEWMGWISAYNGNTIYAQKFQGRVTLTRDTSTSTAYMEL |
| | | | | RSLRSDDTAMYYCARDPDYYGSGSYSDYWGQGTLVTVSSGGGGQGG |
| | | | | GGQGGGGQEIVLTQSPATLSVSPGERATLSCRASQSVSSNLAWYQQKP |
| | | | | GQAPRLLIYGASSRATGIPARFSGSGSGTEFTLTISSLQSEDFAVYYCQQ |
| | | | | YHSWPLLTFGCGTKVEIKSGGGGQEVQLVESGGGLVQPGGSLKLSCAA |
| | | | | SGFTFNKYAMNWVRQAPGKGLEWVARIRSKYNNYATYYADSVKDRF |
| | | | | TISRDDSKNTAYLQMNNLKTEDTAVYYCVRHGNFGNSYISYWAYWG |
| | | | | QGTLVTVSSGGGGQGGGGQGGGGQQTVVTQEPSLTVSPGGTVTLTCG |
| | | | | SSTGAVTSGNYPNWVQQKPGQAPRGLIGGTKFLAPGTPARFSGSLLGG |
| | | | | KAALTLSGVQPEDEAEYYCVLWYSNRWVFGGGTKLTVL |
| 233. | CD20 82-A3 CC x | arti- | aa | EVQLVESGGGLVQPDRSLRLSCAASGFTFRDYAMHWVRQAPGKCLE |
| | CD22 16-G4 CC x | ficial | | WVSGIAWNSDSIGYADSVKGRFTISRDNAKNSLFLQMHSLRPEDTALY |
| | I2E | | | FCAKDTLYGSGSPRAFDIWGQGTMVTVSSGGGGSGGGGSGGGGSEIVL |
| | | | | TQSPATLSVSPGERATLSCRASQSVNNNLAWYQQKPGQAPRLLIYGAS |
| | | | | TRATGIPARFSGSGSGTEFTLTISRLEPEDFAVYYCQQSNNWPITFGCGT |
| | | | | RLEIKSGGGGSQVQLVQSGAEVKKPGASVKVSCKASGYTFTSYGISWV |
| | | | | RQAPGQCLEWMGWISAYNGNTIYAQKFQGRVTLTRDTSTSTAYMELR |
| | | | | SLRSDDTAMYYCARDPDYYGSGSYSDYWGQGTLVTVSSGGGGSGGG |
| | | | | GSGGGGSEIVLTQSPATLSVSPGERATLSCRASQSVSSNLAWYQQKPG |
| | | | | QAPRLLIYGASSRATGIPARFSGSGSGTEFTLTISSLQSEDFAVYYCQQY |
| | | | | HSWPLLTFGCGTKVEIKSGGGGSEVQLVESGGGLVQPGGSLKLSCAAS |
| | | | | GFTFNKYAINWVRQAPGKGLEWVARIRSKYNNYATYYADAVKDRFTI |
| | | | | SRDDSKNTVYLQMNNLKTEDTAVYYCARAGNFGSSYISYWAYWGQG |
| | | | | TLVTVSSGGGGSGGGGSGGGGSQTVVTQEPSLTVSPGGTVTITCGSSTG |
| | | | | AVTSGNYPNWVQKKPGQAPRGLIGGTKFLAPGTPARFSGSLSGGKAAL |
| | | | | TLSGVQPEDEAEYYCVLWYSNRWVFGSGTKLTVL |
| 234. | CD20 82-A3 CC x | arti- | aa | EVQLVESGGGLVQPDRSLRLSCAASGFTFRDYAMHWVRQAPGKCLE |
| | CD22 16-G4 CC x | ficial | | WVSGIAWNSDSIGYADSVKGRFTISRDNAKNSLFLQMHSLRPEDTALY |
| | I2E clipopt | | | FCAKDTLYGSGSPRAFDIWGQGTMVTVSSGGGGQGGGGQGGGGQEIV |
| | | | | LTQSPATLSVSPGERATLSCRASQSVNNNLAWYQQKPGQAPRLLIYGA |
| | | | | STRATGIPARFSGSGSGTEFTLTISRLEPEDFAVYYCQQSNNWPITFGCG |
| | | | | TRLEIKSGGGGQQVQLVQSGAEVKKPGASVKVSCKASGYTFTSYGISW |
| | | | | VRQAPGQCLEWMGWISAYNGNTIYAQKFQGRVTLTRDTSTSTAYMEL |
| | | | | RSLRSDDTAMYYCARDPDYYGSGSYSDYWGQGTLVTVSSGGGGQGG |
| | | | | GGQGGGGQEIVLTQSPATLSVSPGERATLSCRASQSVSSNLAWYQQKP |
| | | | | GQAPRLLIYGASSRATGIPARFSGSGSGTEFTLTISSLQSEDFAVYYCQQ |
| | | | | YHSWPLLTFGCGTKVEIKSGGGGQEVQLVESGGGLVQPGGSLKLSCAA |
| | | | | SGFTFNKYAINWVRQAPGKGLEWVARIRSKYNNYATYYADAVKDRFT |
| | | | | ISRDDSKNTVYLQMNNLKTEDTAVYYCARAGNFGSSYISYWAYWGQ |
| | | | | GTLVTVSSGGGGQGGGGQGGGGQQTVVTQEPSLTVSPGGTVTITCGSS |
| | | | | TGAVTSGNYPNWVQKKPGQAPRGLIGGTKFLAPGTPARFSGSLSGGKA |
| | | | | ALTLSGVQPEDEAEYYCVLWYSNRWVFGSGTKLTVL |
| 235. | CD20 82-A3 CC x | arti- | aa | EVQLVESGGGLVQPDRSLRLSCAASGFTFRDYAMHWVRQAPGKCLE |
| | CD22 16-G4 CC x | ficial | | WVSGIAWNSDSIGYADSVKGRFTISRDNAKNSLFLQMHSLRPEDTALY |
| | I2C x scFc | | | FCAKDTLYGSGSPRAFDIWGQGTMVTVSSGGGGSGGGGSGGGGSEIVL |
| | | | | TQSPATLSVSPGERATLSCRASQSVNNNLAWYQQKPGQAPRLLIYGAS |
| | | | | TRATGIPARFSGSGSGTEFTLTISRLEPEDFAVYYCQQSNNWPITFGCGT |
| | | | | RLEIKSGGGGSQVQLVQSGAEVKKPGASVKVSCKASGYTFTSYGISWV |
| | | | | RQAPGQCLEWMGWISAYNGNTIYAQKFQGRVTLTRDTSTSTAYMELR |
| | | | | SLRSDDTAMYYCARDPDYYGSGSYSDYWGQGTLVTVSSGGGGSGGG |
| | | | | GSGGGGSEIVLTQSPATLSVSPGERATLSCRASQSVSSNLAWYQQKPG |
| | | | | QAPRLLIYGASSRATGIPARFSGSGSGTEFTLTISSLQSEDFAVYYCQQY |
| | | | | HSWPLLTFGCGTKVEIKSGGGGSEVQLVESGGGLVQPGGSLKLSCAAS |
| | | | | GFTFNKYAMNWVRQAPGKGLEWVARIRSKYNNYATYYADSVKDRFT |
| | | | | ISRDDSKNTAYLQMNNLKTEDTAVYYCVRHGNFGNSYISYWAYWGQ |
| | | | | GTLVTVSSGGGGSGGGGSGGGGSQTVVTQEPSLTVSPGGTVTLTCGSS |
| | | | | TGAVTSGNYPNWVQQKPGQAPRGLIGGTKFLAPGTPARFSGSLLGGKA |
| | | | | ALTLSGVQPEDEAEYYCVLWYSNRWVFGGGTKLTVLGGGGDKTHTC |
| | | | | PPCPAPELLGGPSVFLFPPKPKDTLMISRTPEVTCVVVDVSHEDPEVKFN |
| | | | | WYVDGVEVHNAKTKPCEEQYGSTYRCVSVLTVLHQDWLNGKEYKCK |
| | | | | VSNKALPAPIEKTISKAKGQPREPQVYTLPPSREEMTKNQVSLTCLVKG |
| | | | | FYPSDIAVEWESNGQPENNYKTTPPVLDSDGSFFLYSKLTVDKSRWQQ |
| | | | | GNVFSCSVMHEALHNHYTQKSLSLSPGKGGGGSGGGGSGGGGSGGGG |
| | | | | SGGGGSGGGGSDKTHTCPPCPAPELLGGPSVFLFPPKPKDTLMISRTPE |
| | | | | VTCVVVDVSHEDPEVKFNWYVDGVEVHNAKTKPCEEQYGSTYRCVS |
| | | | | VLTVLHQDWLNGKEYKCKVSNKALPAPIEKTISKAKGQPREPQVYTLP |
| | | | | PSREEMTKNQVSLTCLVKGFYPSDIAVEWESNGQPENNYKTTPPVLDS |
| | | | | DGSFFLYSKLTVDKSRWQQGNVFSCSVMHEALHNHYTQKSLSLSPGK |
| 236. | CD20 82-A3 CC x | arti- | aa | EVQLVESGGGLVQPDRSLRLSCAASGFTFRDYAMHWVRQAPGKCLE |
| | CD22 16-G4 CC x | ficial | | WVSGIAWNSDSIGYADSVKGRFTISRDNAKNSLFLQMHSLRPEDTALY |
| | I2C x scFc | | | FCAKDTLYGSGSPRAFDIWGQGTMVTVSSGGGGQGGGGQGGGGQEIV |
| | clipopt | | | LTQSPATLSVSPGERATLSCRASQSVNNNLAWYQQKPGQAPRLLIYGA |
| | | | | STRATGIPARFSGSGSGTEFTLTISRLEPEDFAVYYCQQSNNWPITFGCG |
| | | | | TRLEIKSGGGGQQVQLVQSGAEVKKPGASVKVSCKASGYTFTSYGISW |
| | | | | VRQAPGQCLEWMGWISAYNGNTIYAQKFQGRVTLTRDTSTSTAYMEL |
| | | | | RSLRSDDTAMYYCARDPDYYGSGSYSDYWGQGTLVTVSSGGGGQGG |
| | | | | GGQGGGGQEIVLTQSPATLSVSPGERATLSCRASQSVSSNLAWYQQKP |
| | | | | GQAPRLLIYGASSRATGIPARFSGSGSGTEFTLTISSLQSEDFAVYYCQQ |
| | | | | YHSWPLLTFGCGTKVEIKSGGGGQEVQLVESGGGLVQPGGSLKLSCAA |
| | | | | SGFTFNKYAMNWVRQAPGKGLEWVARIRSKYNNYATYYADSVKDRF |
| | | | | TISRDDSKNTAYLQMNNLKTEDTAVYYCVRHGNFGNSYISYWAYWG |
| | | | | QGTLVTVSSGGGGQGGGGQGGGGQQTVVTQEPSLTVSPGGTVTLTCG |
| | | | | SSTGAVTSGNYPNWVQQKPGQAPRGLIGGTKFLAPGTPARFSGSLLGG |
| | | | | KAALTLSGVQPEDEAEYYCVLWYSNRWVFGGGTKLTVLGGGGCPPCP |
| | | | | APELLGGPSVFLFPPKPKDTLMISRTPEVTCVVVDVSHEEPEVKFNWYV |
| | | | | DGVEVHNAKTKPCEEQYGSTYRCVSVLTVLHQDWLNGKEYKCKVSN |
| | | | | KALPAPIEKTISKAKGQPREPQVYTLPPSREEMTKNQVSLTCLVKGFYP |
| | | | | SDIAVEWESNGQPENNYKTTPPVLDSDGSFFLYSKLTVDKSRWQQGNV |
| | | | | FSCSVMHEALHNHYTQKSLSLSPGKGGGGQGGGGQGGGGQGGGGQG |
| | | | | GGGQGGGGQCPPCPAPELLGGPSVFLFPPKPKDTLMISRTPEVTCVVVD |
| | | | | VSHEEPEVKFNWYVDGVEVHNAKTKPCEEQYGSTYRCVSVLTVLHQD |
| | | | | WLNGKEYKCKVSNKALPAPIEKTISKAKGQPREPQVYTLPPSREEMTK |
| | | | | NQVSLTCLVKGFYPSDIAVEWESNGQPENNYKTTPPVLDSDGSFFLYS |
| | | | | KLTVDKSRWQQGNVFSCSVMHEALHNHYTQKSLSLSPGK |
| 237. | CD20 82-A3 CC x | arti- | aa | EVQLVESGGGLVQPDRSLRLSCAASGFTFRDYAMHWVRQAPGKCLE |
| | CD22 16-G4 CC x | ficial | | WVSGIAWNSDSIGYADSVKGRFTISRDNAKNSLFLQMHSLRPEDTALY |
| | I2E x scFc | | | FCAKDTLYGSGSPRAFDIWGQGTMVTVSSGGGGSGGGGSGGGGSEIVL |
| | | | | TQSPATLSVSPGERATLSCRASQSVNNNLAWYQQKPGQAPRLLIYGAS |
| | | | | TRATGIPARFSGSGSGTEFTLTISRLEPEDFAVYYCQQSNNWPITFGCGT |
| | | | | RLEIKSGGGGSQVQLVQSGAEVKKPGASVKVSCKASGYTFTSYGISWV |
| | | | | RQAPGQCLEWMGWISAYNGNTIYAQKFQGRVTLTRDTSTSTAYMELR |
| | | | | SLRSDDTAMYYCARDPDYYGSGSYSDYWGQGTLVTVSSGGGGSGGG |
| | | | | GSGGGGSEIVLTQSPATLSVSPGERATLSCRASQSVSSNLAWYQQKPG |
| | | | | QAPRLLIYGASSRATGIPARFSGSGSGTEFTLTISSLQSEDFAVYYCQQY |
| | | | | HSWPLLTFGCGTKVEIKSGGGGSEVQLVESGGGLVQPGGSLKLSCAAS |
| | | | | GFTFNKYAINWVRQAPGKGLEWVARIRSKYNNYATYYADAVKDRFTI |
| | | | | SRDDSKNTVYLQMNNLKTEDTAVYYCARAGNFGSSYISYWAYWGQG |
| | | | | TLVTVSSGGGGSGGGGSGGGGSQTVVTQEPSLTVSPGGTVTITCGSSTG |
| | | | | AVTSGNYPNWVQKKPGQAPRGLIGGTKFLAPGTPARFSGSLSGGKAAL |
| | | | | TLSGVQPEDEAEYYCVLWYSNRWVFGSGTKLTVLGGGGDKTHTCPPC |
| | | | | PAPELLGGPSVFLFPPKPKDTLMISRTPEVTCVVVDVSHEDPEVKFNWY |
| | | | | VDGVEVHNAKTKPCEEQYGSTYRCVSVLTVLHQDWLNGKEYKCKVS |
| | | | | NKALPAPIEKTISKAKGQPREPQVYTLPPSREEMTKNQVSLTCLVKGFY |
| | | | | PSDIAVEWESNGQPENNYKTTPPVLDSDGSFFLYSKLTVDKSRWQQGN |
| | | | | VFSCSVMHEALHNHYTQKSLSLSPGKGGGGSGGGGSGGGGSGGGGSG |
| | | | | GGGSGGGGSDKTHTCPPCPAPELLGGPSVFLFPPKPKDTLMISRTPEVT |
| | | | | CVVVDVSHEDPEVKFNWYVDGVEVHNAKTKPCEEQYGSTYRCVSVL |
| | | | | TVLHQDWLNGKEYKCKVSNKALPAPIEKTISKAKGQPREPQVYTLPPS |
| | | | | REEMTKNQVSLTCLVKGFYPSDIAVEWESNGQPENNYKTTPPVLDSDG |
| | | | | SFFLYSKLTVDKSRWQQGNVFSCSVMHEALHNHYTQKSLSLSPGK |
| 238. | CD20 82-A3 CC x | arti- | aa | EVQLVESGGGLVQPDRSLRLSCAASGFTFRDYAMHWVRQAPGKCLE |
| | CD22 16-G4 CC x | ficial | | WVSGIAWNSDSIGYADSVKGRFTISRDNAKNSLFLQMHSLRPEDTALY |
| | I2E x scFc | | | FCAKDTLYGSGSPRAFDIWGQGTMVTVSSGGGGQGGGGQGGGGQEIV |
| | clipopt | | | LTQSPATLSVSPGERATLSCRASQSVNNNLAWYQQKPGQAPRLLIYGA |
| | | | | STRATGIPARFSGSGSGTEFTLTISRLEPEDFAVYYCQQSNNWPITFGCG |
| | | | | TRLEIKSGGGGQQVQLVQSGAEVKKPGASVKVSCKASGYTFTSYGISW |
| | | | | VRQAPGQCLEWMGWISAYNGNTIYAQKFQGRVTLTRDTSTSTAYMEL |
| | | | | RSLRSDDTAMYYCARDPDYYGSGSYSDYWGQGTLVTVSSGGGGQGG |
| | | | | GGQGGGGQEIVLTQSPATLSVSPGERATLSCRASQSVSSNLAWYQQKP |
| | | | | GQAPRLLIYGASSRATGIPARFSGSGSGTEFTLTISSLQSEDFAVYYCQQ |
| | | | | YHSWPLLTFGCGTKVEIKSGGGGQEVQLVESGGGLVQPGGSLKLSCAA |
| | | | | SGFTFNKYAINWVRQAPGKGLEWVARIRSKYNNYATYYADAVKDRFT |
| | | | | ISRDDSKNTVYLQMNNLKTEDTAVYYCARAGNFGSSYISYWAYWGQ |
| | | | | GTLVTVSSGGGGQGGGGQGGGGQQTVVTQEPSLTVSPGGTVTITCGSS |
| | | | | TGAVTSGNYPNWVQKKPGQAPRGLIGGTKFLAPGTPARFSGSLSGGKA |
| | | | | ALTLSGVQPEDEAEYYCVLWYSNRWVFGSGTKLTVLGGGGCPPCPAP |
| | | | | ELLGGPSVFLFPPKPKDTLMISRTPEVTCVVVDVSHEEPEVKFNWYVD |
| | | | | GVEVHNAKTKPCEEQYGSTYRCVSVLTVLHQDWLNGKEYKCKVSNK |
| | | | | ALPAPIEKTISKAKGQPREPQVYTLPPSREEMTKNQVSLTCLVKGFYPS |
| | | | | DIAVEWESNGQPENNYKTTPPVLDSDGSFFLYSKLTVDKSRWQQGNVF |
| | | | | SCSVMHEALHNHYTQKSLSLSPGKGGGGQGGGGQGGGGQGGGGQGG |
| | | | | GGQGGGGQCPPCPAPELLGGPSVFLFPPKPKDTLMISRTPEVTCVVVDV |
| | | | | SHEEPEVKFNWYVDGVEVHNAKTKPCEEQYGSTYRCVSVLTVLHQD |
| | | | | WLNGKEYKCKVSNKALPAPIEKTISKAKGQPREPQVYTLPPSREEMTK |
| | | | | NQVSLTCLVKGFYPSDIAVEWESNGQPENNYKTTPPVLDSDGSFFLYS |
| | | | | KLTVDKSRWQQGNVFSCSVMHEALHNHYTQKSLSLSPGK |
| 239. | CD20 82-A3 CC x | arti- | aa | EVQLVESGGGLVQPDRSLRLSCAASGFTFRDYAMHWVRQAPGKCLE |
| | CD22 17-F6 CC | ficial | | WVSGIAWNSDSIGYADSVKGRFTISRDNAKNSLFLQMHSLRPEDTALY |
| | | | | FCAKDTLYGSGSPRAFDIWGQGTMVTVSSGGGGSGGGGSGGGGSEIVL |
| | | | | TQSPATLSVSPGERATLSCRASQSVNNNLAWYQQKPGQAPRLLIYGAS |
| | | | | TRATGIPARFSGSGSGTEFTLTISRLEPEDFAVYYCQQSNNWPITFGCGT |
| | | | | RLEIKSGGGGSQVQLVQSGAEVKKPGASVKVSCKASGYTFTTYGISWV |
| | | | | RQAPGQCLEWMGWISPKNGVTTYAQKFQGRVTITADESTSTAYMELS |
| | | | | RLTSDDTAMYYCARDPDYYGSGSYSDYWGQGTLVTVSSGGGGSGGG |
| | | | | GSGGGGSEIVLTQSPATLSVSPGERATLSCRASQSVSSNLAWYQQKPG |
| | | | | QAPRLLIYGASSRATGIPARFSGSGSGTEFTLTISSLQSEDFAVYYCQQY |
| | | | | HSWPLLTFGCGTKVEIK |
| 240. | CD20 82-A3 CC x | arti- | aa | EVQLVESGGGLVQPDRSLRLSCAASGFTFRDYAMHWVRQAPGKCLE |
| | CD22 17-F6 CC | ficial | | WVSGIAWNSDSIGYADSVKGRFTISRDNAKNSLFLQMHSLRPEDTALY |
| | clipopt | | | FCAKDTLYGSGSPRAFDIWGQGTMVTVSSGGGGQGGGGQGGGGQEIV |
| | | | | LTQSPATLSVSPGERATLSCRASQSVNNNLAWYQQKPGQAPRLLIYGA |
| | | | | STRATGIPARFSGSGSGTEFTLTISRLEPEDFAVYYCQQSNNWPITFGCG |
| | | | | TRLEIKSGGGGQQVQLVQSGAEVKKPGASVKVSCKASGYTFTTYGISW |
| | | | | VRQAPGQCLEWMGWISPKNGVTTYAQKFQGRVTITADESTSTAYMEL |
| | | | | SRLTSDDTAMYYCARDPDYYGSGSYSDYWGQGTLVTVSSGGGGQGG |
| | | | | GGQGGGGQEIVLTQSPATLSVSPGERATLSCRASQSVSSNLAWYQQKP |
| | | | | GQAPRLLIYGASSRATGIPARFSGSGSGTEFTLTISSLQSEDFAVYYCQQ |
| | | | | YHSWPLLTFGCGTKVEIK |
| 241. | CD20 82-A3 CC x | arti- | aa | EVQLVESGGGLVQPDRSLRLSCAASGFTFRDYAMHWVRQAPGKCLE |
| | CD22 17-F6 CC x | ficial | | WVSGIAWNSDSIGYADSVKGRFTISRDNAKNSLFLQMHSLRPEDTALY |
| | I2C | | | FCAKDTLYGSGSPRAFDIWGQGTMVTVSSGGGGSGGGGSGGGGSEIVL |
| | | | | TQSPATLSVSPGERATLSCRASQSVNNNLAWYQQKPGQAPRLLIYGAS |
| | | | | TRATGIPARFSGSGSGTEFTLTISRLEPEDFAVYYCQQSNNWPITFGCGT |
| | | | | RLEIKSGGGGSQVQLVQSGAEVKKPGASVKVSCKASGYTFTTYGISWV |
| | | | | RQAPGQCLEWMGWISPKNGVTTYAQKFQGRVTITADESTSTAYMELS |
| | | | | RLTSDDTAMYYCARDPDYYGSGSYSDYWGQGTLVTVSSGGGGSGGG |
| | | | | GSGGGGSEIVLTQSPATLSVSPGERATLSCRASQSVSSNLAWYQQKPG |
| | | | | QAPRLLIYGASSRATGIPARFSGSGSGTEFTLTISSLQSEDFAVYYCQQY |
| | | | | HSWPLLTFGCGTKVEIKSGGGGSEVQLVESGGGLVQPGGSLKLSCAAS |
| | | | | GFTFNKYAMNWVRQAPGKGLEWVARIRSKYNNYATYYADSVKDRFT |
| | | | | ISRDDSKNTAYLQMNNLKTEDTAVYYCVRHGNFGNSYISYWAYWGQ |
| | | | | GTLVTVSSGGGGSGGGGSGGGGSQTVVTQEPSLTVSPGGTVTLTCGSS |
| | | | | TGAVTSGNYPNWVQQKPGQAPRGLIGGTKFLAPGTPARFSGSLLGGKA |
| | | | | ALTLSGVQPEDEAEYYCVLWYSNRWVFGGGTKLTVL |
| 242. | CD20 82-A3 CC x | arti- | aa | EVQLVESGGGLVQPDRSLRLSCAASGFTFRDYAMHWVRQAPGKCLE |
| | CD22 17-F6 CC x | ficial | | WVSGIAWNSDSIGYADSVKGRFTISRDNAKNSLFLQMHSLRPEDTALY |
| | I2C clipopt | | | FCAKDTLYGSGSPRAFDIWGQGTMVTVSSGGGGQGGGGQGGGGQEIV |
| | | | | LTQSPATLSVSPGERATLSCRASQSVNNNLAWYQQKPGQAPRLLIYGA |
| | | | | STRATGIPARFSGSGSGTEFTLTISRLEPEDFAVYYCQQSNNWPITFGCG |
| | | | | TRLEIKSGGGGQQVQLVQSGAEVKKPGASVKVSCKASGYTFTTYGISW |
| | | | | VRQAPGQCLEWMGWISPKNGVTTYAQKFQGRVTITADESTSTAYMEL |
| | | | | SRLTSDDTAMYYCARDPDYYGSGSYSDYWGQGTLVTVSSGGGGQGG |
| | | | | GGQGGGGQEIVLTQSPATLSVSPGERATLSCRASQSVSSNLAWYQQKP |
| | | | | GQAPRLLIYGASSRATGIPARFSGSGSGTEFTLTISSLQSEDFAVYYCQQ |
| | | | | YHSWPLLTFGCGTKVEIKSGGGGQEVQLVESGGGLVQPGGSLKLSCAA |
| | | | | SGFTFNKYAMNWVRQAPGKGLEWVARIRSKYNNYATYYADSVKDRF |
| | | | | TISRDDSKNTAYLQMNNLKTEDTAVYYCVRHGNFGNSYISYWAYWG |
| | | | | QGTLVTVSSGGGGQGGGGQGGGGQQTVVTQEPSLTVSPGGTVTLTCG |
| | | | | SSTGAVTSGNYPNWVQQKPGQAPRGLIGGTKFLAPGTPARFSGSLLGG |
| | | | | KAALTLSGVQPEDEAEYYCVLWYSNRWVFGGGTKLTVL |
| 243. | CD20 82-A3 CC x | arti- | aa | EVQLVESGGGLVQPDRSLRLSCAASGFTFRDYAMHWVRQAPGKCLE |
| | CD22 17-F6 CC x | ficial | | WVSGIAWNSDSIGYADSVKGRFTISRDNAKNSLFLQMHSLRPEDTALY |
| | I2E | | | FCAKDTLYGSGSPRAFDIWGQGTMVTVSSGGGGSGGGGSGGGGSEIVL |
| | | | | TQSPATLSVSPGERATLSCRASQSVNNNLAWYQQKPGQAPRLLIYGAS |
| | | | | TRATGIPARFSGSGSGTEFTLTISRLEPEDFAVYYCQQSNNWPITFGCGT |
| | | | | RLEIKSGGGGSQVQLVQSGAEVKKPGASVKVSCKASGYTFTTYGISWV |
| | | | | RQAPGQCLEWMGWISPKNGVTTYAQKFQGRVTITADESTSTAYMELS |
| | | | | RLTSDDTAMYYCARDPDYYGSGSYSDYWGQGTLVTVSSGGGGSGGG |
| | | | | GSGGGGSEIVLTQSPATLSVSPGERATLSCRASQSVSSNLAWYQQKPG |
| | | | | QAPRLLIYGASSRATGIPARFSGSGSGTEFTLTISSLQSEDFAVYYCQQY |
| | | | | HSWPLLTFGCGTKVEIKSGGGGSEVQLVESGGGLVQPGGSLKLSCAAS |
| | | | | GFTFNKYAINWVRQAPGKGLEWVARIRSKYNNYATYYADAVKDRFTI |
| | | | | SRDDSKNTVYLQMNNLKTEDTAVYYCARAGNFGSSYISYWAYWGQG |
| | | | | TLVTVSSGGGGSGGGGSGGGGSQTVVTQEPSLTVSPGGTVTITCGSSTG |
| | | | | AVTSGNYPNWVQKKPGQAPRGLIGGTKFLAPGTPARFSGSLSGGKAAL |
| | | | | TLSGVQPEDEAEYYCVLWYSNRWVFGSGTKLTVL |
| 244. | CD20 82-A3 CC x | arti- | aa | EVQLVESGGGLVQPDRSLRLSCAASGFTFRDYAMHWVRQAPGKCLE |
| | CD22 17-F6 CC x | ficial | | WVSGIAWNSDSIGYADSVKGRFTISRDNAKNSLFLQMHSLRPEDTALY |
| | I2E clipopt | | | FCAKDTLYGSGSPRAFDIWGQGTMVTVSSGGGGQGGGGQGGGGQEIV |
| | | | | LTQSPATLSVSPGERATLSCRASQSVNNNLAWYQQKPGQAPRLLIYGA |
| | | | | STRATGIPARFSGSGSGTEFTLTISRLEPEDFAVYYCQQSNNWPITFGCG |
| | | | | TRLEIKSGGGGQQVQLVQSGAEVKKPGASVKVSCKASGYTFTTYGISW |
| | | | | VRQAPGQCLEWMGWISPKNGVTTYAQKFQGRVTITADESTSTAYMEL |
| | | | | SRLTSDDTAMYYCARDPDYYGSGSYSDYWGQGTLVTVSSGGGGQGG |
| | | | | GGQGGGGQEIVLTQSPATLSVSPGERATLSCRASQSVSSNLAWYQQKP |
| | | | | GQAPRLLIYGASSRATGIPARFSGSGSGTEFTLTISSLQSEDFAVYYCQQ |
| | | | | YHSWPLLTFGCGTKVEIKSGGGGQEVQLVESGGGLVQPGGSLKLSCAA |
| | | | | SGFTFNKYAINWVRQAPGKGLEWVARIRSKYNNYATYYADAVKDRFT |
| | | | | ISRDDSKNTVYLQMNNLKTEDTAVYYCARAGNFGSSYISYWAYWGQ |
| | | | | GTLVTVSSGGGGQGGGGQGGGGQQTVVTQEPSLTVSPGGTVTITCGSS |
| | | | | TGAVTSGNYPNWVQKKPGQAPRGLIGGTKFLAPGTPARFSGSLSGGKA |
| | | | | ALTLSGVQPEDEAEYYCVLWYSNRWVFGSGTKLTVL |
| 245. | CD20 82-A3 CC x | arti- | aa | EVQLVESGGGLVQPDRSLRLSCAASGFTFRDYAMHWVRQAPGKCLE |
| | CD22 17-F6 CC x | ficial | | WVSGIAWNSDSIGYADSVKGRFTISRDNAKNSLFLQMHSLRPEDTALY |
| | I2C x scFc | | | FCAKDTLYGSGSPRAFDIWGQGTMVTVSSGGGGGGGGSGGGGSEIVL |
| | | | | TQSPATLSVSPGERATLSCRASQSVNNNLAWYQQKPGQAPRLLIYGAS |
| | | | | TRATGIPARFSGSGSGTEFTLTISRLEPEDFAVYYCQQSNNWPITFGCGT |
| | | | | RLEIKSGGGGSQVQLVQSGAEVKKPGASVKVSCKASGYTFTTYGISWV |
| | | | | RQAPGQCLEWMGWISPKNGVTTYAQKFQGRVTITADESTSTAYMELS |
| | | | | RLTSDDTAMYYCARDPDYYGSGSYSDYWGQGTLVTVSSGGGGSGGG |
| | | | | GSGGGGSEIVLTQSPATLSVSPGERATLSCRASQSVSSNLAWYQQKPG |
| | | | | QAPRLLIYGASSRATGIPARFSGSGSGTEFTLTISSLQSEDFAVYYCQQY |
| | | | | HSWPLLTFGCGTKVEIKSGGGGSEVQLVESGGGLVQPGGSLKLSCAAS |
| | | | | GFTFNKYAMNWVRQAPGKGLEWVARIRSKYNNYATYYADSVKDRFT |
| | | | | ISRDDSKNTAYLQMNNLKTEDTAVYYCVRHGNFGNSYISYWAYWGQ |
| | | | | GTLVTVSSGGGGSGGGGSGGGGSQTVVTQEPSLTVSPGGTVTLTCGSS |
| | | | | TGAVTSGNYPNWVQQKPGQAPRGLIGGTKFLAPGTPARFSGSLLGGKA |
| | | | | ALTLSGVQPEDEAEYYCVLWYSNRWVFGGGTKLTVLGGGGDKTHTC |
| | | | | PPCPAPELLGGPSVFLFPPKPKDTLMISRTPEVTCVVVDVSHEDPEVKFN |
| | | | | WYVDGVEVHNAKTKPCEEQYGSTYRCVSVLTVLHQDWLNGKEYKCK |
| | | | | VSNKALPAPIEKTISKAKGQPREPQVYTLPPSREEMTKNQVSLTCLVKG |
| | | | | FYPSDIAVEWESNGQPENNYKTTPPVLDSDGSFFLYSKLTVDKSRWQQ |
| | | | | GNVFSCSVMHEALHNHYTQKSLSLSPGKGGGGSGGGGSGGGGSGGGG |
| | | | | SGGGGSGGGGSDKTHTCPPCPAPELLGGPSVFLFPPKPKDTLMISRTPE |
| | | | | VTCVVVDVSHEDPEVKFNWYVDGVEVHNAKTKPCEEQYGSTYRCVS |
| | | | | VLTVLHQDWLNGKEYKCKVSNKALPAPIEKTISKAKGQPREPQVYTLP |
| | | | | PSREEMTKNQVSLTCLVKGFYPSDIAVEWESNGQPENNYKTTPPVLDS |
| | | | | DGSFFLYSKLTVDKSRWQQGNVFSCSVMHEALHNHYTQKSLSLSPGK |
| 246. | CD20 82-A3 CC x | arti- | aa | EVQLVESGGGLVQPDRSLRLSCAASGFTFRDYAMHWVRQAPGKCLE |
| | CD22 17-F6 CC x | ficial | | WVSGIAWNSDSIGYADSVKGRFTISRDNAKNSLFLQMHSLRPEDTALY |
| | I2C x scFc | | | FCAKDTLYGSGSPRAFDIWGQGTMVTVSSGGGGQGGGGQGGGGQEIV |
| | clipopt | | | LTQSPATLSVSPGERATLSCRASQSVNNNLAWYQQKPGQAPRLLIYGA |
| | | | | STRATGIPARFSGSGSGTEFTLTISRLEPEDFAVYYCQQSNNWPITFGCG |
| | | | | TRLEIKSGGGGQQVQLVQSGAEVKKPGASVKVSCKASGYTFTTYGISW |
| | | | | VRQAPGQCLEWMGWISPKNGVTTYAQKFQGRVTITADESTSTAYMEL |
| | | | | SRLTSDDTAMYYCARDPDYYGSGSYSDYWGQGTLVTVSSGGGGQGG |
| | | | | GGQGGGGQEIVLTQSPATLSVSPGERATLSCRASQSVSSNLAWYQQKP |
| | | | | GQAPRLLIYGASSRATGIPARFSGSGSGTEFTLTISSLQSEDFAVYYCQQ |
| | | | | YHSWPLLTFGCGTKVEIKSGGGGQEVQLVESGGGLVQPGGSLKLSCAA |
| | | | | SGFTFNKYAMNWVRQAPGKGLEWVARIRSKYNNYATYYADSVKDRF |
| | | | | TISRDDSKNTAYLQMNNLKTEDTAVYYCVRHGNFGNSYISYWAYWG |
| | | | | QGTLVTVSSGGGGQGGGGQGGGGQQTVVTQEPSLTVSPGGTVTLTCG |
| | | | | SSTGAVTSGNYPNWVQQKPGQAPRGLIGGTKFLAPGTPARFSGSLLGG |
| | | | | KAALTLSGVQPEDEAEYYCVLWYSNRWVFGGGTKLTVLGGGGCPPCP |
| | | | | APELLGGPSVFLFPPKPKDTLMISRTPEVTCVVVDVSHEEPEVKFNWYV |
| | | | | DGVEVHNAKTKPCEEQYGSTYRCVSVLTVLHQDWLNGKEYKCKVSN |
| | | | | KALPAPIEKTISKAKGQPREPQVYTLPPSREEMTKNQVSLTCLVKGFYP |
| | | | | SDIAVEWESNGQPENNYKTTPPVLDSDGSFFLYSKLTVDKSRWQQGNV |
| | | | | FSCSVMHEALHNHYTQKSLSLSPGKGGGGQGGGGQGGGGQGGGGQG |
| | | | | GGGQGGGGQCPPCPAPELLGGPSVFLFPPKPKDTLMISRTPEVTCVVVD |
| | | | | VSHEEPEVKFNWYVDGVEVHNAKTKPCEEQYGSTYRCVSVLTVLHQD |
| | | | | WLNGKEYKCKVSNKALPAPIEKTISKAKGQPREPQVYTLPPSREEMTK |
| | | | | NQVSLTCLVKGFYPSDIAVEWESNGQPENNYKTTPPVLDSDGSFFLYS |
| | | | | KLTVDKSRWQQGNVFSCSVMHEALHNHYTQKSLSLSPGK |
| 247. | CD20 82-A3 CC x | arti- | aa | EVQLVESGGGLVQPDRSLRLSCAASGFTFRDYAMHWVRQAPGKCLE |
| | CD22 17-F6 CC x | ficial | | WVSGIAWNSDSIGYADSVKGRFTISRDNAKNSLFLQMHSLRPEDTALY |
| | I2E x scFc | | | FCAKDTLYGSGSPRAFDIWGQGTMVTVSSGGGGSGGGGSGGGGSEIVL |
| | | | | TQSPATLSVSPGERATLSCRASQSVNNNLAWYQQKPGQAPRLLIYGAS |
| | | | | TRATGIPARFSGSGSGTEFTLTISRLEPEDFAVYYCQQSNNWPITFGCGT |
| | | | | RLEIKSGGGGSQVQLVQSGAEVKKPGASVKVSCKASGYTFTTYGISWV |
| | | | | RQAPGQCLEWMGWISPKNGVTTYAQKFQGRVTITADESTSTAYMELS |
| | | | | RLTSDDTAMYYCARDPDYYGSGSYSDYWGQGTLVTVSSGGGGSGGG |
| | | | | GSGGGGSEIVLTQSPATLSVSPGERATLSCRASQSVSSNLAWYQQKPG |
| | | | | QAPRLLIYGASSRATGIPARFSGSGSGTEFTLTISSLQSEDFAVYYCQQY |
| | | | | HSWPLLTFGCGTKVEIKSGGGGSEVQLVESGGGLVQPGGSLKLSCAAS |
| | | | | GFTFNKYAINWVRQAPGKGLEWVARIRSKYNNYATYYADAVKDRFTI |
| | | | | SRDDSKNTVYLQMNNLKTEDTAVYYCARAGNFGSSYISYWAYWGQG |
| | | | | TLVTVSSGGGGSGGGGSGGGGSQTVVTQEPSLTVSPGGTVTITCGSSTG |
| | | | | AVTSGNYPNWVQKKPGQAPRGLIGGTKFLAPGTPARFSGSLSGGKAAL |
| | | | | TLSGVQPEDEAEYYCVLWYSNRWVFGSGTKLTVLGGGGDKTHTCPPC |
| | | | | PAPELLGGPSVFLFPPKPKDTLMISRTPEVTCVVVDVSHEDPEVKFNWY |
| | | | | VDGVEVHNAKTKPCEEQYGSTYRCVSVLTVLHQDWLNGKEYKCKVS |
| | | | | NKALPAPIEKTISKAKGQPREPQVYTLPPSREEMTKNQVSLTCLVKGFY |
| | | | | PSDIAVEWESNGQPENNYKTTPPVLDSDGSFFLYSKLTVDKSRWQQGN |
| | | | | VFSCSVMHEALHNHYTQKSLSLSPGKGGGGSGGGGSGGGGSGGGGSG |
| | | | | GGGSGGGGSDKTHTCPPCPAPELLGGPSVFLFPPKPKDTLMISRTPEVT |
| | | | | CVVVDVSHEDPEVKFNWYVDGVEVHNAKTKPCEEQYGSTYRCVSVL |
| | | | | TVLHQDWLNGKEYKCKVSNKALPAPIEKTISKAKGQPREPQVYTLPPS |
| | | | | REEMTKNQVSLTCLVKGFYPSDIAVEWESNGQPENNYKTTPPVLDSDG |
| | | | | SFFLYSKLTVDKSRWQQGNVFSCSVMHEALHNHYTQKSLSLSPGK |
| 248. | CD20 82-A3 CC x | arti- | aa | EVQLVESGGGLVQPDRSLRLSCAASGFTFRDYAMHWVRQAPGKCLE |
| | CD22 17-F6 CC x | ficial | | WVSGIAWNSDSIGYADSVKGRFTISRDNAKNSLFLQMHSLRPEDTALY |
| | I2E x scFc | | | FCAKDTLYGSGSPRAFDIWGQGTMVTVSSGGGGQGGGGQGGGGQEIV |
| | clipopt | | | LTQSPATLSVSPGERATLSCRASQSVNNNLAWYQQKPGQAPRLLIYGA |
| | | | | STRATGIPARFSGSGSGTEFTLTISRLEPEDFAVYYCQQSNNWPITFGCG |
| | | | | TRLEIKSGGGGQQVQLVQSGAEVKKPGASVKVSCKASGYTFTTYGISW |
| | | | | VRQAPGQCLEWMGWISPKNGVTTYAQKFQGRVTITADESTSTAYMEL |
| | | | | SRLTSDDTAMYYCARDPDYYGSGSYSDYWGQGTLVTVSSGGGGQGG |
| | | | | GGQGGGGQEIVLTQSPATLSVSPGERATLSCRASQSVSSNLAWYQQKP |
| | | | | GQAPRLLIYGASSRATGIPARFSGSGSGTEFTLTISSLQSEDFAVYYCQQ |
| | | | | YHSWPLLTFGCGTKVEIKSGGGGQEVQLVESGGGLVQPGGSLKLSCAA |
| | | | | SGFTFNKYAINWVRQAPGKGLEWVARIRSKYNNYATYYADAVKDRFT |
| | | | | ISRDDSKNTVYLQMNNLKTEDTAVYYCARAGNFGSSYISYWAYWGQ |
| | | | | GTLVTVSSGGGGQGGGGQGGGGQQTVVTQEPSLTVSPGGTVTITCGSS |
| | | | | TGAVTSGNYPNWVQKKPGQAPRGLIGGTKFLAPGTPARFSGSLSGGKA |
| | | | | ALTLSGVQPEDEAEYYCVLWYSNRWVFGSGTKLTVLGGGGCPPCPAP |
| | | | | ELLGGPSVFLFPPKPKDTLMISRTPEVTCVVVDVSHEEPEVKFNWYVD |
| | | | | GVEVHNAKTKPCEEQYGSTYRCVSVLTVLHQDWLNGKEYKCKVSNK |
| | | | | ALPAPIEKTISKAKGQPREPQVYTLPPSREEMTKNQVSLTCLVKGFYPS |
| | | | | DIAVEWESNGQPENNYKTTPPVLDSDGSFFLYSKLTVDKSRWQQGNVF |
| | | | | SCSVMHEALHNHYTQKSLSLSPGKGGGGQGGGGQGGGGQGGGGQGG |
| | | | | GGQGGGGQCPPCPAPELLGGPSVFLFPPKPKDTLMISRTPEVTCVVVDV |
| | | | | SHEEPEVKFNWYVDGVEVHNAKTKPCEEQYGSTYRCVSVLTVLHQD |
| | | | | WLNGKEYKCKVSNKALPAPIEKTISKAKGQPREPQVYTLPPSREEMTK |
| | | | | NQVSLTCLVKGFYPSDIAVEWESNGQPENNYKTTPPVLDSDGSFFLYS |
| | | | | KLTVDKSRWQQGNVFSCSVMHEALHNHYTQKSLSLSPGK |
| 249. | CD20 82-A3 CC x | arti- | aa | EVQLVESGGGLVQPDRSLRLSCAASGFTFRDYAMHWVRQAPGKCLE |
| | CD22 43-F7 CC | ficial | | WVSGIAWNSDSIGYADSVKGRFTISRDNAKNSLFLQMHSLRPEDTALY |
| | | | | FCAKDTLYGSGSPRAFDIWGQGTMVTVSSGGGGSGGGGSGGGGSEIVL |
| | | | | TQSPATLSVSPGERATLSCRASQSVNNNLAWYQQKPGQAPRLLIYGAS |
| | | | | TRATGIPARFSGSGSGTEFTLTISRLEPEDFAVYYCQQSNNWPITFGCGT |
| | | | | RLEIKSGGGGSQVQLVQSGGEVKKPGASVKVSCKASGYTFTSYGISWV |
| | | | | RQAPGQCLEWMGWISPQTGNAIYAQKLQGRVTMTRDTSTSTAYMELR |
| | | | | SLRSDDTAVYYCARDPDYYGSGSYSDYWGQGTLVTVSSGGGGSGGG |
| | | | | GSGGGGSEIVLTQSPATLSVSPGERATLSCRASQSVSSNLAWYQQKPG |
| | | | | QAPRLLIYGASSRATGIPARFSGSGSGTEFTLTISSLQSEDFAVYYCQQY |
| | | | | HSWPLLTFGCGTKVEIK |
| 250. | CD20 82-A3 CC x | arti- | aa | EVQLVESGGGLVQPDRSLRLSCAASGFTFRDYAMHWVRQAPGKCLE |
| | CD22 43-F7 CC | ficial | | WVSGIAWNSDSIGYADSVKGRFTISRDNAKNSLFLQMHSLRPEDTALY |
| | clipopt | | | FCAKDTLYGSGSPRAFDIWGQGTMVTVSSGGGGQGGGGQGGGGQEIV |
| | | | | LTQSPATLSVSPGERATLSCRASQSVNNNLAWYQQKPGQAPRLLIYGA |
| | | | | STRATGIPARFSGSGSGTEFTLTISRLEPEDFAVYYCQQSNNWPITFGCG |
| | | | | TRLEIKSGGGGQQVQLVQSGGEVKKPGASVKVSCKASGYTFTSYGISW |
| | | | | VRQAPGQCLEWMGWISPQTGNAIYAQKLQGRVTMTRDTSTSTAYMEL |
| | | | | RSLRSDDTAVYYCARDPDYYGSGSYSDYWGQGTLVTVSSGGGGQGG |
| | | | | GGQGGGGQEIVLTQSPATLSVSPGERATLSCRASQSVSSNLAWYQQKP |
| | | | | GQAPRLLIYGASSRATGIPARFSGSGSGTEFTLTISSLQSEDFAVYYCQQ |
| | | | | YHSWPLLTFGCGTKVEIK |
| 251. | CD20 82-A3 CC x | arti- | aa | EVQLVESGGGLVQPDRSLRLSCAASGFTFRDYAMHWVRQAPGKCLE |
| | CD22 43-F7 CC x | ficial | | WVSGIAWNSDSIGYADSVKGRFTISRDNAKNSLFLQMHSLRPEDTALY |
| | I2C | | | FCAKDTLYGSGSPRAFDIWGQGTMVTVSSGGGGSGGGGSGGGGSEIVL |
| | | | | TQSPATLSVSPGERATLSCRASQSVNNNLAWYQQKPGQAPRLLIYGAS |
| | | | | TRATGIPARFSGSGSGTEFTLTISRLEPEDFAVYYCQQSNNWPITFGCGT |
| | | | | RLEIKSGGGGSQVQLVQSGGEVKKPGASVKVSCKASGYTFTSYGISWV |
| | | | | RQAPGQCLEWMGWISPQTGNAIYAQKLQGRVTMTRDTSTSTAYMELR |
| | | | | SLRSDDTAVYYCARDPDYYGSGSYSDYWGQGTLVTVSSGGGGSGGG |
| | | | | GSGGGGSEIVLTQSPATLSVSPGERATLSCRASQSVSSNLAWYQQKPG |
| | | | | QAPRLLIYGASSRATGIPARFSGSGSGTEFTLTISSLQSEDFAVYYCQQY |
| | | | | HSWPLLTFGCGTKVEIKSGGGGSEVQLVESGGGLVQPGGSLKLSCAAS |
| | | | | GFTFNKYAMNWVRQAPGKGLEWVARIRSKYNNYATYYADSVKDRFT |
| | | | | ISRDDSKNTAYLQMNNLKTEDTAVYYCVRHGNFGNSYISYWAYWGQ |
| | | | | GTLVTVSSGGGGSGGGGSGGGGSQTVVTQEPSLTVSPGGTVTLTCGSS |
| | | | | TGAVTSGNYPNWVQQKPGQAPRGLIGGTKFLAPGTPARFSGSLLGGKA |
| | | | | ALTLSGVQPEDEAEYYCVLWYSNRWVFGGGTKLTVL |
| 252. | CD20 82-A3 CC x | arti- | aa | EVQLVESGGGLVQPDRSLRLSCAASGFTFRDYAMHWVRQAPGKCLE |
| | CD22 43-F7 CC x | ficial | | WVSGIAWNSDSIGYADSVKGRFTISRDNAKNSLFLQMHSLRPEDTALY |
| | I2C clipopt | | | FCAKDTLYGSGSPRAFDIWGQGTMVTVSSGGGGQGGGGQGGGGQEIV |
| | | | | LTQSPATLSVSPGERATLSCRASQSVNNNLAWYQQKPGQAPRLLIYGA |
| | | | | STRATGIPARFSGSGSGTEFTLTISRLEPEDFAVYYCQQSNNWPITFGCG |
| | | | | TRLEIKSGGGGQQVQLVQSGGEVKKPGASVKVSCKASGYTFTSYGISW |
| | | | | VRQAPGQCLEWMGWISPQTGNAIYAQKLQGRVTMTRDTSTSTAYMEL |
| | | | | RSLRSDDTAVYYCARDPDYYGSGSYSDYWGQGTLVTVSSGGGGQGG |
| | | | | GGQGGGGQEIVLTQSPATLSVSPGERATLSCRASQSVSSNLAWYQQKP |
| | | | | GQAPRLLIYGASSRATGIPARFSGSGSGTEFTLTISSLQSEDFAVYYCQQ |
| | | | | YHSWPLLTFGCGTKVEIKSGGGGQEVQLVESGGGLVQPGGSLKLSCAA |
| | | | | SGFTFNKYAMNWVRQAPGKGLEWVARIRSKYNNYATYYADSVKDRF |
| | | | | TISRDDSKNTAYLQMNNLKTEDTAVYYCVRHGNFGNSYISYWAYWG |
| | | | | QGTLVTVSSGGGGQGGGGQGGGGQQTVVTQEPSLTVSPGGTVTLTCG |
| | | | | SSTGAVTSGNYPNWVQQKPGQAPRGLIGGTKFLAPGTPARFSGSLLGG |
| | | | | KAALTLSGVQPEDEAEYYCVLWYSNRWVFGGGTKLTVL |
| 253. | CD20 82-A3 CC x | arti- | aa | EVQLVESGGGLVQPDRSLRLSCAASGFTFRDYAMHWVRQAPGKCLE |
| | CD22 43-F7 CC x | ficial | | WVSGIAWNSDSIGYADSVKGRFTISRDNAKNSLFLQMHSLRPEDTALY |
| | I2E | | | FCAKDTLYGSGSPRAFDIWGQGTMVTVSSGGGGSGGGGSGGGGSEIVL |
| | | | | TQSPATLSVSPGERATLSCRASQSVNNNLAWYQQKPGQAPRLLIYGAS |
| | | | | TRATGIPARFSGSGSGTEFTLTISRLEPEDFAVYYCQQSNNWPITFGCGT |
| | | | | RLEIKSGGGGSQVQLVQSGGEVKKPGASVKVSCKASGYTFTSYGISWV |
| | | | | RQAPGQCLEWMGWISPQTGNAIYAQKLQGRVTMTRDTSTSTAYMELR |
| | | | | SLRSDDTAVYYCARDPDYYGSGSYSDYWGQGTLVTVSSGGGGSGGG |
| | | | | GSGGGGSEIVLTQSPATLSVSPGERATLSCRASQSVSSNLAWYQQKPG |
| | | | | QAPRLLIYGASSRATGIPARFSGSGSGTEFTLTISSLQSEDFAVYYCQQY |
| | | | | HSWPLLTFGCGTKVEIKSGGGGSEVQLVESGGGLVQPGGSLKLSCAAS |
| | | | | GFTFNKYAINWVRQAPGKGLEWVARIRSKYNNYATYYADAVKDRFTI |
| | | | | SRDDSKNTVYLQMNNLKTEDTAVYYCARAGNFGSSYISYWAYWGQG |
| | | | | TLVTVSSGGGGSGGGGSGGGGSQTVVTQEPSLTVSPGGTVTITCGSSTG |
| | | | | AVTSGNYPNWVQKKPGQAPRGLIGGTKFLAPGTPARFSGSLSGGKAAL |
| | | | | TLSGVQPEDEAEYYCVLWYSNRWVFGSGTKLTVL |
| 254. | CD20 82-A3 CC x | arti- | aa | EVQLVESGGGLVQPDRSLRLSCAASGFTFRDYAMHWVRQAPGKCLE |
| | CD22 43-F7 CC x | ficial | | WVSGIAWNSDSIGYADSVKGRFTISRDNAKNSLFLQMHSLRPEDTALY |
| | I2E clipopt | | | FCAKDTLYGSGSPRAFDIWGQGTMVTVSSGGGGQGGGGQGGGGQEIV |
| | | | | LTQSPATLSVSPGERATLSCRASQSVNNNLAWYQQKPGQAPRLLIYGA |
| | | | | STRATGIPARFSGSGSGTEFTLTISRLEPEDFAVYYCQQSNNWPITFGCG |
| | | | | TRLEIKSGGGGQQVQLVQSGGEVKKPGASVKVSCKASGYTFTSYGISW |
| | | | | VRQAPGQCLEWMGWISPQTGNAIYAQKLQGRVTMTRDTSTSTAYMEL |
| | | | | RSLRSDDTAVYYCARDPDYYGSGSYSDYWGQGTLVTVSSGGGGQGG |
| | | | | GGQGGGGQEIVLTQSPATLSVSPGERATLSCRASQSVSSNLAWYQQKP |
| | | | | GQAPRLLIYGASSRATGIPARFSGSGSGTEFTLTISSLQSEDFAVYYCQQ |
| | | | | YHSWPLLTFGCGTKVEIKSGGGGQEVQLVESGGGLVQPGGSLKLSCAA |
| | | | | SGFTFNKYAINWVRQAPGKGLEWVARIRSKYNNYATYYADAVKDRFT |
| | | | | ISRDDSKNTVYLQMNNLKTEDTAVYYCARAGNFGSSYISYWAYWGQ |
| | | | | GTLVTVSSGGGGQGGGGQGGGGQQTVVTQEPSLTVSPGGTVTITCGSS |
| | | | | TGAVTSGNYPNWVQKKPGQAPRGLIGGTKFLAPGTPARFSGSLSGGKA |
| | | | | ALTLSGVQPEDEAEYYCVLWYSNRWVFGSGTKLTVL |
| 255. | CD20 82-A3 CC x | arti- | aa | EVQLVESGGGLVQPDRSLRLSCAASGFTFRDYAMHWVRQAPGKCLE |
| | CD22 43-F7 CC x | ficial | | WVSGIAWNSDSIGYADSVKGRFTISRDNAKNSLFLQMHSLRPEDTALY |
| | I2C x scFc | | | FCAKDTLYGSGSPRAFDIWGQGTMVTVSSGGGGSGGGGSGGGGSEIVL |
| | | | | TQSPATLSVSPGERATLSCRASQSVNNNLAWYQQKPGQAPRLLIYGAS |
| | | | | TRATGIPARFSGSGSGTEFTLTISRLEPEDFAVYYCQQSNNWPITFGCGT |
| | | | | RLEIKSGGGGSQVQLVQSGGEVKKPGASVKVSCKASGYTFTSYGISWV |
| | | | | RQAPGQCLEWMGWISPQTGNAIYAQKLQGRVTMTRDTSTSTAYMELR |
| | | | | SLRSDDTAVYYCARDPDYYGSGSYSDYWGQGTLVTVSSGGGGSGGG |
| | | | | GSGGGGSEIVLTQSPATLSVSPGERATLSCRASQSVSSNLAWYQQKPG |
| | | | | QAPRLLIYGASSRATGIPARFSGSGSGTEFTLTISSLQSEDFAVYYCQQY |
| | | | | HSWPLLTFGCGTKVEIKSGGGGSEVQLVESGGGLVQPGGSLKLSCAAS |
| | | | | GFTFNKYAMNWVRQAPGKGLEWVARIRSKYNNYATYYADSVKDRFT |
| | | | | ISRDDSKNTAYLQMNNLKTEDTAVYYCVRHGNFGNSYISYWAYWGQ |
| | | | | GTLVTVSSGGGGSGGGGSGGGGSQTVVTQEPSLTVSPGGTVTLTCGSS |
| | | | | TGAVTSGNYPNWVQQKPGQAPRGLIGGTKFLAPGTPARFSGSLLGGKA |
| | | | | ALTLSGVQPEDEAEYYCVLWYSNRWVFGGGTKLTVLGGGGDKTHTC |
| | | | | PPCPAPELLGGPSVFLFPPKPKDTLMISRTPEVTCVVVDVSHEDPEVKFN |
| | | | | WYVDGVEVHNAKTKPCEEQYGSTYRCVSVLTVLHQDWLNGKEYKCK |
| | | | | VSNKALPAPIEKTISKAKGQPREPQVYTLPPSREEMTKNQVSLTCLVKG |
| | | | | FYPSDIAVEWESNGQPENNYKTTPPVLDSDGSFFLYSKLTVDKSRWQQ |
| | | | | GNVFSCSVMHEALHNHYTQKSLSLSPGKGGGGSGGGGSGGGGSGGGG |
| | | | | SGGGGSGGGGSDKTHTCPPCPAPELLGGPSVFLFPPKPKDTLMISRTPE |
| | | | | VTCVVVDVSHEDPEVKFNWYVDGVEVHNAKTKPCEEQYGSTYRCVS |
| | | | | VLTVLHQDWLNGKEYKCKVSNKALPAPIEKTISKAKGQPREPQVYTLP |
| | | | | PSREEMTKNQVSLTCLVKGFYPSDIAVEWESNGQPENNYKTTPPVLDS |
| | | | | DGSFFLYSKLTVDKSRWQQGNVFSCSVMHEALHNHYTQKSLSLSPGK |
| 256. | CD20 82-A3 CC x | arti- | aa | EVQLVESGGGLVQPDRSLRLSCAASGFTFRDYAMHWVRQAPGKCLE |
| | CD22 43-F7 CC x | ficial | | WVSGIAWNSDSIGYADSVKGRFTISRDNAKNSLFLQMHSLRPEDTALY |
| | I2C x scFc | | | FCAKDTLYGSGSPRAFDIWGQGTMVTVSSGGGGQGGGGQGGGGQEIV |
| | clipopt | | | LTQSPATLSVSPGERATLSCRASQSVNNNLAWYQQKPGQAPRLLIYGA |
| | | | | STRATGIPARFSGSGSGTEFTLTISRLEPEDFAVYYCQQSNNWPITFGCG |
| | | | | TRLEIKSGGGGQQVQLVQSGGEVKKPGASVKVSCKASGYTFTSYGISW |
| | | | | VRQAPGQCLEWMGWISPQTGNAIYAQKLQGRVTMTRDTSTSTAYMEL |
| | | | | RSLRSDDTAVYYCARDPDYYGSGSYSDYWGQGTLVTVSSGGGGQGG |
| | | | | GGQGGGGQEIVLTQSPATLSVSPGERATLSCRASQSVSSNLAWYQQKP |
| | | | | GQAPRLLIYGASSRATGIPARFSGSGSGTEFTLTISSLQSEDFAVYYCQQ |
| | | | | YHSWPLLTFGCGTKVEIKSGGGGQEVQLVESGGGLVQPGGSLKLSCAA |
| | | | | SGFTFNKYAMNWVRQAPGKGLEWVARIRSKYNNYATYYADSVKDRF |
| | | | | TISRDDSKNTAYLQMNNLKTEDTAVYYCVRHGNFGNSYISYWAYWG |
| | | | | QGTLVTVSSGGGGQGGGGQGGGGQQTVVTQEPSLTVSPGGTVTLTCG |
| | | | | SSTGAVTSGNYPNWVQQKPGQAPRGLIGGTKFLAPGTPARFSGSLLGG |
| | | | | KAALTLSGVQPEDEAEYYCVLWYSNRWVFGGGTKLTVLGGGGCPPCP |
| | | | | APELLGGPSVFLFPPKPKDTLMISRTPEVTCVVVDVSHEEPEVKFNWYV |
| | | | | DGVEVHNAKTKPCEEQYGSTYRCVSVLTVLHQDWLNGKEYKCKVSN |
| | | | | KALPAPIEKTISKAKGQPREPQVYTLPPSREEMTKNQVSLTCLVKGFYP |
| | | | | SDIAVEWESNGQPENNYKTTPPVLDSDGSFFLYSKLTVDKSRWQQGNV |
| | | | | FSCSVMHEALHNHYTQKSLSLSPGKGGGGQGGGGQGGGGQGGGGQG |
| | | | | GGGQGGGGQCPPCPAPELLGGPSVFLFPPKPKDTLMISRTPEVTCVVVD |
| | | | | VSHEEPEVKFNWYVDGVEVHNAKTKPCEEQYGSTYRCVSVLTVLHQD |
| | | | | WLNGKEYKCKVSNKALPAPIEKTISKAKGQPREPQVYTLPPSREEMTK |
| | | | | NQVSLTCLVKGFYPSDIAVEWESNGQPENNYKTTPPVLDSDGSFFLYS |
| | | | | KLTVDKSRWQQGNVFSCSVMHEALHNHYTQKSLSLSPGK |
| 257. | CD20 82-A3 CC x | arti- | aa | EVQLVESGGGLVQPDRSLRLSCAASGFTFRDYAMHWVRQAPGKCLE |
| | CD22 43-F7 CC x | ficial | | WVSGIAWNSDSIGYADSVKGRFTISRDNAKNSLFLQMHSLRPEDTALY |
| | I2E x scFc | | | FCAKDTLYGSGSPRAFDIWGQGTMVTVSSGGGGSGGGGSGGGGSEIVL |
| | | | | TQSPATLSVSPGERATLSCRASQSVNNNLAWYQQKPGQAPRLLIYGAS |
| | | | | TRATGIPARFSGSGSGTEFTLTISRLEPEDFAVYYCQQSNNWPITFGCGT |
| | | | | RLEIKSGGGGSQVQLVQSGGEVKKPGASVKVSCKASGYTFTSYGISWV |
| | | | | RQAPGQCLEWMGWISPQTGNAIYAQKLQGRVTMTRDTSTSTAYMELR |
| | | | | SLRSDDTAVYYCARDPDYYGSGSYSDYWGQGTLVTVSSGGGGSGGG |
| | | | | GSGGGGSEIVLTQSPATLSVSPGERATLSCRASQSVSSNLAWYQQKPG |
| | | | | QAPRLLIYGASSRATGIPARFSGSGSGTEFTLTISSLQSEDFAVYYCQQY |
| | | | | HSWPLLTFGCGTKVEIKSGGGGSEVQLVESGGGLVQPGGSLKLSCAAS |
| | | | | GFTFNKYAINWVRQAPGKGLEWVARIRSKYNNYATYYADAVKDRFTI |
| | | | | SRDDSKNTVYLQMNNLKTEDTAVYYCARAGNFGSSYISYWAYWGQG |
| | | | | TLVTVSSGGGGSGGGGSGGGGSQTVVTQEPSLTVSPGGTVTITCGSSTG |
| | | | | AVTSGNYPNWVQKKPGQAPRGLIGGTKFLAPGTPARFSGSLSGGKAAL |
| | | | | TLSGVQPEDEAEYYCVLWYSNRWVFGSGTKLTVLGGGGDKTHTCPPC |
| | | | | PAPELLGGPSVFLFPPKPKDTLMISRTPEVTCVVVDVSHEDPEVKFNWY |
| | | | | VDGVEVHNAKTKPCEEQYGSTYRCVSVLTVLHQDWLNGKEYKCKVS |
| | | | | NKALPAPIEKTISKAKGQPREPQVYTLPPSREEMTKNQVSLTCLVKGFY |
| | | | | PSDIAVEWESNGQPENNYKTTPPVLDSDGSFFLYSKLTVDKSRWQQGN |
| | | | | VFSCSVMHEALHNHYTQKSLSLSPGKGGGGSGGGGSGGGGSGGGGSG |
| | | | | GGGSGGGGSDKTHTCPPCPAPELLGGPSVFLFPPKPKDTLMISRTPEVT |
| | | | | CVVVDVSHEDPEVKFNWYVDGVEVHNAKTKPCEEQYGSTYRCVSVL |
| | | | | TVLHQDWLNGKEYKCKVSNKALPAPIEKTISKAKGQPREPQVYTLPPS |
| | | | | REEMTKNQVSLTCLVKGFYPSDIAVEWESNGQPENNYKTTPPVLDSDG |
| | | | | SFFLYSKLTVDKSRWQQGNVFSCSVMHEALHNHYTQKSLSLSPGK |
| 258. | CD20 82-A3 CC x | arti- | aa | EVQLVESGGGLVQPDRSLRLSCAASGFTFRDYAMHWVRQAPGKCLE |
| | CD22 43-F7 CC x | ficial | | WVSGIAWNSDSIGYADSVKGRFTISRDNAKNSLFLQMHSLRPEDTALY |
| | I2E x scFc | | | FCAKDTLYGSGSPRAFDIWGQGTMVTVSSGGGGQGGGGQGGGGQEIV |
| | clipopt | | | LTQSPATLSVSPGERATLSCRASQSVNNNLAWYQQKPGQAPRLLIYGA |
| | | | | STRATGIPARFSGSGSGTEFTLTISRLEPEDFAVYYCQQSNNWPITFGCG |
| | | | | TRLEIKSGGGGQQVQLVQSGGEVKKPGASVKVSCKASGYTFTSYGISW |
| | | | | VRQAPGQCLEWMGWISPQTGNAIYAQKLQGRVTMTRDTSTSTAYMEL |
| | | | | RSLRSDDTAVYYCARDPDYYGSGSYSDYWGQGTLVTVSSGGGGQGG |
| | | | | GGQGGGGQEIVLTQSPATLSVSPGERATLSCRASQSVSSNLAWYQQKP |
| | | | | GQAPRLLIYGASSRATGIPARFSGSGSGTEFTLTISSLQSEDFAVYYCQQ |
| | | | | YHSWPLLTFGCGTKVEIKSGGGGQEVQLVESGGGLVQPGGSLKLSCAA |
| | | | | SGFTFNKYAINWVRQAPGKGLEWVARIRSKYNNYATYYADAVKDRFT |
| | | | | ISRDDSKNTVYLQMNNLKTEDTAVYYCARAGNFGSSYISYWAYWGQ |
| | | | | GTLVTVSSGGGGQGGGGQGGGGQQTVVTQEPSLTVSPGGTVTITCGSS |
| | | | | TGAVTSGNYPNWVQKKPGQAPRGLIGGTKFLAPGTPARFSGSLSGGKA |
| | | | | ALTLSGVQPEDEAEYYCVLWYSNRWVFGSGTKLTVLGGGGCPPCPAP |
| | | | | ELLGGPSVFLFPPKPKDTLMISRTPEVTCVVVDVSHEEPEVKFNWYVD |
| | | | | GVEVHNAKTKPCEEQYGSTYRCVSVLTVLHQDWLNGKEYKCKVSNK |
| | | | | ALPAPIEKTISKAKGQPREPQVYTLPPSREEMTKNQVSLTCLVKGFYPS |
| | | | | DIAVEWESNGQPENNYKTTPPVLDSDGSFFLYSKLTVDKSRWQQGNVF |
| | | | | SCSVMHEALHNHYTQKSLSLSPGKGGGGQGGGGQGGGGQGGGGQGG |
| | | | | GGQGGGGQCPPCPAPELLGGPSVFLFPPKPKDTLMISRTPEVTCVVVDV |
| | | | | SHEEPEVKFNWYVDGVEVHNAKTKPCEEQYGSTYRCVSVLTVLHQD |
| | | | | WLNGKEYKCKVSNKALPAPIEKTISKAKGQPREPQVYTLPPSREEMTK |
| | | | | NQVSLTCLVKGFYPSDIAVEWESNGQPENNYKTTPPVLDSDGSFFLYS |
| | | | | KLTVDKSRWQQGNVFSCSVMHEALHNHYTQKSLSLSPGK |
| 259. | CD20 82-A3 CC x | arti- | aa | EVQLVESGGGLVQPDRSLRLSCAASGFTFRDYAMHWVRQAPGKCLE |
| | CD22 44-A8 CC | ficial | | WVSGIAWNSDSIGYADSVKGRFTISRDNAKNSLFLQMHSLRPEDTALY |
| | | | | FCAKDTLYGSGSPRAFDIWGQGTMVTVSSGGGGSGGGGSGGGGSEIVL |
| | | | | TQSPATLSVSPGERATLSCRASQSVNNNLAWYQQKPGQAPRLLIYGAS |
| | | | | TRATGIPARFSGSGSGTEFTLTISRLEPEDFAVYYCQQSNNWPITFGCGT |
| | | | | RLEIKSGGGGSQVQLVQSGAEVKKPGASVKVSCKASGYTFTSYGISWV |
| | | | | RQAPGQCLEWMGWISAYNGNAIYAQKLQGRVTMTRDTSTSTAYMEL |
| | | | | RSLRSDDTAVYYCARDPDYYGSGSYSDYWGQGTLVTVSSGGGGSGG |
| | | | | GGSGGGGSEIVLTQSPATLSVSPGERATLSCRASQSVSSNLAWYQQKP |
| | | | | GQAPRLLIYGASSRATGIPARFSGSGSGTEFTLTISSLQSEDFAVYYCQQ |
| | | | | YHSWPILHFGCGTKVEIK |
| 260. | CD20 82-A3 CC x | arti- | aa | EVQLVESGGGLVQPDRSLRLSCAASGFTFRDYAMHWVRQAPGKCLE |
| | CD22 44-A8 CC | ficial | | WVSGIAWNSDSIGYADSVKGRFTISRDNAKNSLFLQMHSLRPEDTALY |
| | clipopt | | | FCAKDTLYGSGSPRAFDIWGQGTMVTVSSGGGGQGGGGQGGGGQEIV |
| | | | | LTQSPATLSVSPGERATLSCRASQSVNNNLAWYQQKPGQAPRLLIYGA |
| | | | | STRATGIPARFSGSGSGTEFTLTISRLEPEDFAVYYCQQSNNWPITFGCG |
| | | | | TRLEIKSGGGGQQVQLVQSGAEVKKPGASVKVSCKASGYTFTSYGISW |
| | | | | VRQAPGQCLEWMGWISAYNGNAIYAQKLQGRVTMTRDTSTSTAYME |
| | | | | LRSLRSDDTAVYYCARDPDYYGSGSYSDYWGQGTLVTVSSGGGGQG |
| | | | | GGGQGGGGQEIVLTQSPATLSVSPGERATLSCRASQSVSSNLAWYQQK |
| | | | | PGQAPRLLIYGASSRATGIPARFSGSGSGTEFTLTISSLQSEDFAVYYCQ |
| | | | | QYHSWPILHFGCGTKVEIK |
| 261. | CD20 82-A3 CC x | arti- | aa | EVQLVESGGGLVQPDRSLRLSCAASGFTFRDYAMHWVRQAPGKCLE |
| | CD22 44-A8 CC x | ficial | | WVSGIAWNSDSIGYADSVKGRFTISRDNAKNSLFLQMHSLRPEDTALY |
| | I2C | | | FCAKDTLYGSGSPRAFDIWGQGTMVTVSSGGGGSGGGGSGGGGSEIVL |
| | | | | TQSPATLSVSPGERATLSCRASQSVNNNLAWYQQKPGQAPRLLIYGAS |
| | | | | TRATGIPARFSGSGSGTEFTLTISRLEPEDFAVYYCQQSNNWPITFGCGT |
| | | | | RLEIKSGGGGSQVQLVQSGAEVKKPGASVKVSCKASGYTFTSYGISWV |
| | | | | RQAPGQCLEWMGWISAYNGNAIYAQKLQGRVTMTRDTSTSTAYMEL |
| | | | | RSLRSDDTAVYYCARDPDYYGSGSYSDYWGQGTLVTVSSGGGGSGG |
| | | | | GGSGGGGSEIVLTQSPATLSVSPGERATLSCRASQSVSSNLAWYQQKP |
| | | | | GQAPRLLIYGASSRATGIPARFSGSGSGTEFTLTISSLQSEDFAVYYCQQ |
| | | | | YHSWPILHFGCGTKVEIKSGGGGSEVQLVESGGGLVQPGGSLKLSCAA |
| | | | | SGFTFNKYAMNWVRQAPGKGLEWVARIRSKYNNYATYYADSVKDRF |
| | | | | TISRDDSKNTAYLQMNNLKTEDTAVYYCVRHGNFGNSYISYWAYWG |
| | | | | QGTLVTVSSGGGGSGGGGSGGGGSQTVVTQEPSLTVSPGGTVTLTCGS |
| | | | | STGAVTSGNYPNWVQQKPGQAPRGLIGGTKFLAPGTPARFSGSLLGGK |
| | | | | AALTLSGVQPEDEAEYYCVLWYSNRWVFGGGTKLTVL |
| 262. | CD20 82-A3 CC x | arti- | aa | EVQLVESGGGLVQPDRSLRLSCAASGFTFRDYAMHWVRQAPGKCLE |
| | CD22 44-A8 CC x | ficial | | WVSGIAWNSDSIGYADSVKGRFTISRDNAKNSLFLQMHSLRPEDTALY |
| | I2C clipopt | | | FCAKDTLYGSGSPRAFDIWGQGTMVTVSSGGGGQGGGGQGGGGQEIV |
| | | | | LTQSPATLSVSPGERATLSCRASQSVNNNLAWYQQKPGQAPRLLIYGA |
| | | | | STRATGIPARFSGSGSGTEFTLTISRLEPEDFAVYYCQQSNNWPITFGCG |
| | | | | TRLEIKSGGGGQQVQLVQSGAEVKKPGASVKVSCKASGYTFTSYGISW |
| | | | | VRQAPGQCLEWMGWISAYNGNAIYAQKLQGRVTMTRDTSTSTAYME |
| | | | | LRSLRSDDTAVYYCARDPDYYGSGSYSDYWGQGTLVTVSSGGGGQG |
| | | | | GGGQGGGGQEIVLTQSPATLSVSPGERATLSCRASQSVSSNLAWYQQK |
| | | | | PGQAPRLLIYGASSRATGIPARFSGSGSGTEFTLTISSLQSEDFAVYYCQ |
| | | | | QYHSWPILHFGCGTKVEIKSGGGGQEVQLVESGGGLVQPGGSLKLSCA |
| | | | | ASGFTFNKYAMNWVRQAPGKGLEWVARIRSKYNNYATYYADSVKDR |
| | | | | FTISRDDSKNTAYLQMNNLKTEDTAVYYCVRHGNFGNSYISYWAYWG |
| | | | | QGTLVTVSSGGGGQGGGGQGGGGQQTVVTQEPSLTVSPGGTVTLTCG |
| | | | | SSTGAVTSGNYPNWVQQKPGQAPRGLIGGTKFLAPGTPARFSGSLLGG |
| | | | | KAALTLSGVQPEDEAEYYCVLWYSNRWVFGGGTKLTVL |
| 263. | CD20 82-A3 CC x | arti- | aa | EVQLVESGGGLVQPDRSLRLSCAASGFTFRDYAMHWVRQAPGKCLE |
| | CD22 44-A8 CC x | ficial | | WVSGIAWNSDSIGYADSVKGRFTISRDNAKNSLFLQMHSLRPEDTALY |
| | I2E | | | FCAKDTLYGSGSPRAFDIWGQGTMVTVSSGGGGSGGGGSGGGGSEIVL |
| | | | | TQSPATLSVSPGERATLSCRASQSVNNNLAWYQQKPGQAPRLLIYGAS |
| | | | | TRATGIPARFSGSGSGTEFTLTISRLEPEDFAVYYCQQSNNWPITFGCGT |
| | | | | RLEIKSGGGGSQVQLVQSGAEVKKPGASVKVSCKASGYTFTSYGISWV |
| | | | | RQAPGQCLEWMGWISAYNGNAIYAQKLQGRVTMTRDTSTSTAYMEL |
| | | | | RSLRSDDTAVYYCARDPDYYGSGSYSDYWGQGTLVTVSSGGGGSGG |
| | | | | GGSGGGGSEIVLTQSPATLSVSPGERATLSCRASQSVSSNLAWYQQKP |
| | | | | GQAPRLLIYGASSRATGIPARFSGSGSGTEFTLTISSLQSEDFAVYYCQQ |
| | | | | YHSWPILHFGCGTKVEIKSGGGGSEVQLVESGGGLVQPGGSLKLSCAA |
| | | | | SGFTFNKYAINWVRQAPGKGLEWVARIRSKYNNYATYYADAVKDRFT |
| | | | | ISRDDSKNTVYLQMNNLKTEDTAVYYCARAGNFGSSYISYWAYWGQ |
| | | | | GTLVTVSSGGGGSGGGGSGGGGSQTVVTQEPSLTVSPGGTVTITCGSST |
| | | | | GAVTSGNYPNWVQKKPGQAPRGLIGGTKFLAPGTPARFSGSLSGGKA |
| | | | | ALTLSGVQPEDEAEYYCVLWYSNRWVFGSGTKLTVL |
| 264. | CD20 82-A3 CC x | arti- | aa | EVQLVESGGGLVQPDRSLRLSCAASGFTFRDYAMHWVRQAPGKCLE |
| | CD22 44-A8 CC x | ficial | | WVSGIAWNSDSIGYADSVKGRFTISRDNAKNSLFLQMHSLRPEDTALY |
| | I2E clipopt | | | FCAKDTLYGSGSPRAFDIWGQGTMVTVSSGGGGQGGGGQGGGGQEIV |
| | | | | LTQSPATLSVSPGERATLSCRASQSVNNNLAWYQQKPGQAPRLLIYGA |
| | | | | STRATGIPARFSGSGSGTEFTLTISRLEPEDFAVYYCQQSNNWPITFGCG |
| | | | | TRLEIKSGGGGQQVQLVQSGAEVKKPGASVKVSCKASGYTFTSYGISW |
| | | | | VRQAPGQCLEWMGWISAYNGNAIYAQKLQGRVTMTRDTSTSTAYME |
| | | | | LRSLRSDDTAVYYCARDPDYYGSGSYSDYWGQGTLVTVSSGGGGQG |
| | | | | GGGQGGGGQEIVLTQSPATLSVSPGERATLSCRASQSVSSNLAWYQQK |
| | | | | PGQAPRLLIYGASSRATGIPARFSGSGSGTEFTLTISSLQSEDFAVYYCQ |
| | | | | QYHSWPILHFGCGTKVEIKSGGGGQEVQLVESGGGLVQPGGSLKLSCA |
| | | | | ASGFTFNKYAINWVRQAPGKGLEWVARIRSKYNNYATYYADAVKDR |
| | | | | FTISRDDSKNTVYLQMNNLKTEDTAVYYCARAGNFGSSYISYWAYWG |
| | | | | QGTLVTVSSGGGGQGGGGQGGGGQQTVVTQEPSLTVSPGGTVTITCGS |
| | | | | STGAVTSGNYPNWVQKKPGQAPRGLIGGTKFLAPGTPARFSGSLSGGK |
| | | | | AALTLSGVQPEDEAEYYCVLWYSNRWVFGSGTKLTVL |
| 265. | CD20 82-A3 CC x | arti- | aa | EVQLVESGGGLVQPDRSLRLSCAASGFTFRDYAMHWVRQAPGKCLE |
| | CD22 44-A8 CC x | ficial | | WVSGIAWNSDSIGYADSVKGRFTISRDNAKNSLFLQMHSLRPEDTALY |
| | I2C x scFc | | | FCAKDTLYGSGSPRAFDIWGQGTMVTVSSGGGGSGGGGSGGGGSEIVL |
| | | | | TQSPATLSVSPGERATLSCRASQSVNNNLAWYQQKPGQAPRLLIYGAS |
| | | | | TRATGIPARFSGSGSGTEFTLTISRLEPEDFAVYYCQQSNNWPITFGCGT |
| | | | | RLEIKSGGGGSQVQLVQSGAEVKKPGASVKVSCKASGYTFTSYGISWV |
| | | | | RQAPGQCLEWMGWISAYNGNAIYAQKLQGRVTMTRDTSTSTAYMEL |
| | | | | RSLRSDDTAVYYCARDPDYYGSGSYSDYWGQGTLVTVSSGGGGSGG |
| | | | | GGSGGGGSEIVLTQSPATLSVSPGERATLSCRASQSVSSNLAWYQQKP |
| | | | | GQAPRLLIYGASSRATGIPARFSGSGSGTEFTLTISSLQSEDFAVYYCQQ |
| | | | | YHSWPILHFGCGTKVEIKSGGGGSEVQLVESGGGLVQPGGSLKLSCAA |
| | | | | SGFTFNKYAMNWVRQAPGKGLEWVARIRSKYNNYATYYADSVKDRF |
| | | | | TISRDDSKNTAYLQMNNLKTEDTAVYYCVRHGNFGNSYISYWAYWG |
| | | | | QGTLVTVSSGGGGSGGGGSGGGGSQTVVTQEPSLTVSPGGTVTLTCGS |
| | | | | STGAVTSGNYPNWVQQKPGQAPRGLIGGTKFLAPGTPARFSGSLLGGK |
| | | | | AALTLSGVQPEDEAEYYCVLWYSNRWVFGGGTKLTVLGGGGDKTHT |
| | | | | CPPCPAPELLGGPSVFLFPPKPKDTLMISRTPEVTCVVVDVSHEDPEVKF |
| | | | | NWYVDGVEVHNAKTKPCEEQYGSTYRCVSVLTVLHQDWLNGKEYKC |
| | | | | KVSNKALPAPIEKTISKAKGQPREPQVYTLPPSREEMTKNQVSLTCLVK |
| | | | | GFYPSDIAVEWESNGQPENNYKTTPPVLDSDGSFFLYSKLTVDKSRWQ |
| | | | | QGNVFSCSVMHEALHNHYTQKSLSLSPGKGGGGSGGGGSGGGGSGGG |
| | | | | GSGGGGSGGGGSDKTHTCPPCPAPELLGGPSVFLFPPKPKDTLMISRTP |
| | | | | EVTCVVVDVSHEDPEVKFNWYVDGVEVHNAKTKPCEEQYGSTYRCV |
| | | | | SVLTVLHQDWLNGKEYKCKVSNKALPAPIEKTISKAKGQPREPQVYTL |
| | | | | PPSREEMTKNQVSLTCLVKGFYPSDIAVEWESNGQPENNYKTTPPVLD |
| | | | | SDGSFFLYSKLTVDKSRWQQGNVFSCSVMHEALHNHYTQKSLSLSPG |
| | | | | K |
| 266. | CD20 82-A3 CC x | arti- | aa | EVQLVESGGGLVQPDRSLRLSCAASGFTFRDYAMHWVRQAPGKCLE |
| | CD22 44-A8 CC x | ficial | | WVSGIAWNSDSIGYADSVKGRFTISRDNAKNSLFLQMHSLRPEDTALY |
| | I2C x scFc | | | FCAKDTLYGSGSPRAFDIWGQGTMVTVSSGGGGQGGGGQGGGGQEIV |
| | clipopt | | | LTQSPATLSVSPGERATLSCRASQSVNNNLAWYQQKPGQAPRLLIYGA |
| | | | | STRATGIPARFSGSGSGTEFTLTISRLEPEDFAVYYCQQSNNWPITFGCG |
| | | | | TRLEIKSGGGGQQVQLVQSGAEVKKPGASVKVSCKASGYTFTSYGISW |
| | | | | VRQAPGQCLEWMGWISAYNGNAIYAQKLQGRVTMTRDTSTSTAYME |
| | | | | LRSLRSDDTAVYYCARDPDYYGSGSYSDYWGQGTLVTVSSGGGGQG |
| | | | | GGGQGGGGQEIVLTQSPATLSVSPGERATLSCRASQSVSSNLAWYQQK |
| | | | | PGQAPRLLIYGASSRATGIPARFSGSGSGTEFTLTISSLQSEDFAVYYCQ |
| | | | | QYHSWPILHFGCGTKVEIKSGGGGQEVQLVESGGGLVQPGGSLKLSCA |
| | | | | ASGFTFNKYAMNWVRQAPGKGLEWVARIRSKYNNYATYYADSVKDR |
| | | | | FTISRDDSKNTAYLQMNNLKTEDTAVYYCVRHGNFGNSYISYWAYWG |
| | | | | QGTLVTVSSGGGGQGGGGQGGGGQQTVVTQEPSLTVSPGGTVTLTCG |
| | | | | SSTGAVTSGNYPNWVQQKPGQAPRGLIGGTKFLAPGTPARFSGSLLGG |
| | | | | KAALTLSGVQPEDEAEYYCVLWYSNRWVFGGGTKLTVLGGGGCPPCP |
| | | | | APELLGGPSVFLFPPKPKDTLMISRTPEVTCVVVDVSHEEPEVKFNWYV |
| | | | | DGVEVHNAKTKPCEEQYGSTYRCVSVLTVLHQDWLNGKEYKCKVSN |
| | | | | KALPAPIEKTISKAKGQPREPQVYTLPPSREEMTKNQVSLTCLVKGFYP |
| | | | | SDIAVEWESNGQPENNYKTTPPVLDSDGSFFLYSKLTVDKSRWQQGNV |
| | | | | FSCSVMHEALHNHYTQKSLSLSPGKGGGGQGGGGQGGGGQGGGGQG |
| | | | | GGGQGGGGQCPPCPAPELLGGPSVFLFPPKPKDTLMISRTPEVTCVVVD |
| | | | | VSHEEPEVKFNWYVDGVEVHNAKTKPCEEQYGSTYRCVSVLTVLHQD |
| | | | | WLNGKEYKCKVSNKALPAPIEKTISKAKGQPREPQVYTLPPSREEMTK |
| | | | | NQVSLTCLVKGFYPSDIAVEWESNGQPENNYKTTPPVLDSDGSFFLYS |
| | | | | KLTVDKSRWQQGNVFSCSVMHEALHNHYTQKSLSLSPGK |
| 267. | CD20 82-A3 CC x | arti- | aa | EVQLVESGGGLVQPDRSLRLSCAASGFTFRDYAMHWVRQAPGKCLE |
| | CD22 44-A8 CC x | ficial | | WVSGIAWNSDSIGYADSVKGRFTISRDNAKNSLFLQMHSLRPEDTALY |
| | I2E x scFc | | | FCAKDTLYGSGSPRAFDIWGQGTMVTVSSGGGGSGGGGSGGGGSEIVL |
| | | | | TQSPATLSVSPGERATLSCRASQSVNNNLAWYQQKPGQAPRLLIYGAS |
| | | | | TRATGIPARFSGSGSGTEFTLTISRLEPEDFAVYYCQQSNNWPITFGCGT |
| | | | | RLEIKSGGGGSQVQLVQSGAEVKKPGASVKVSCKASGYTFTSYGISWV |
| | | | | RQAPGQCLEWMGWISAYNGNAIYAQKLQGRVTMTRDTSTSTAYMEL |
| | | | | RSLRSDDTAVYYCARDPDYYGSGSYSDYWGQGTLVTVSSGGGGSGG |
| | | | | GGSGGGGSEIVLTQSPATLSVSPGERATLSCRASQSVSSNLAWYQQKP |
| | | | | GQAPRLLIYGASSRATGIPARFSGSGSGTEFTLTISSLQSEDFAVYYCQQ |
| | | | | YHSWPILHFGCGTKVEIKSGGGGSEVQLVESGGGLVQPGGSLKLSCAA |
| | | | | SGFTFNKYAINWVRQAPGKGLEWVARIRSKYNNYATYYADAVKDRFT |
| | | | | ISRDDSKNTVYLQMNNLKTEDTAVYYCARAGNFGSSYISYWAYWGQ |
| | | | | GTLVTVSSGGGGSGGGGSGGGGSQTVVTQEPSLTVSPGGTVTITCGSST |
| | | | | GAVTSGNYPNWVQKKPGQAPRGLIGGTKFLAPGTPARFSGSLSGGKA |
| | | | | ALTLSGVQPEDEAEYYCVLWYSNRWVFGSGTKLTVLGGGGDKTHTCP |
| | | | | PCPAPELLGGPSVFLFPPKPKDTLMISRTPEVTCVVVDVSHEDPEVKFN |
| | | | | WYVDGVEVHNAKTKPCEEQYGSTYRCVSVLTVLHQDWLNGKEYKCK |
| | | | | VSNKALPAPIEKTISKAKGQPREPQVYTLPPSREEMTKNQVSLTCLVKG |
| | | | | FYPSDIAVEWESNGQPENNYKTTPPVLDSDGSFFLYSKLTVDKSRWQQ |
| | | | | GNVFSCSVMHEALHNHYTQKSLSLSPGKGGGGSGGGGSGGGGSGGGG |
| | | | | SGGGGSGGGGSDKTHTCPPCPAPELLGGPSVFLFPPKPKDTLMISRTPE |
| | | | | VTCVVVDVSHEDPEVKFNWYVDGVEVHNAKTKPCEEQYGSTYRCVS |
| | | | | VLTVLHQDWLNGKEYKCKVSNKALPAPIEKTISKAKGQPREPQVYTLP |
| | | | | PSREEMTKNQVSLTCLVKGFYPSDIAVEWESNGQPENNYKTTPPVLDS |
| | | | | DGSFFLYSKLTVDKSRWQQGNVFSCSVMHEALHNHYTQKSLSLSPGK |
| 268. | CD20 82-A3 CC x | arti- | aa | EVQLVESGGGLVQPDRSLRLSCAASGFTFRDYAMHWVRQAPGKCLE |
| | CD22 44-A8 CC x | ficial | | WVSGIAWNSDSIGYADSVKGRFTISRDNAKNSLFLQMHSLRPEDTALY |
| | I2E x scFc | | | FCAKDTLYGSGSPRAFDIWGQGTMVTVSSGGGGQGGGGQGGGGQEIV |
| | clipopt | | | LTQSPATLSVSPGERATLSCRASQSVNNNLAWYQQKPGQAPRLLIYGA |
| | | | | STRATGIPARFSGSGSGTEFTLTISRLEPEDFAVYYCQQSNNWPITFGCG |
| | | | | TRLEIKSGGGGQQVQLVQSGAEVKKPGASVKVSCKASGYTFTSYGISW |
| | | | | VRQAPGQCLEWMGWISAYNGNAIYAQKLQGRVTMTRDTSTSTAYME |
| | | | | LRSLRSDDTAVYYCARDPDYYGSGSYSDYWGQGTLVTVSSGGGGQG |
| | | | | GGGQGGGGQEIVLTQSPATLSVSPGERATLSCRASQSVSSNLAWYQQK |
| | | | | PGQAPRLLIYGASSRATGIPARFSGSGSGTEFTLTISSLQSEDFAVYYCQ |
| | | | | QYHSWPILHFGCGTKVEIKSGGGGQEVQLVESGGGLVQPGGSLKLSCA |
| | | | | ASGFTFNKYAINWVRQAPGKGLEWVARIRSKYNNYATYYADAVKDR |
| | | | | FTISRDDSKNTVYLQMNNLKTEDTAVYYCARAGNFGSSYISYWAYWG |
| | | | | QGTLVTVSSGGGGQGGGGQGGGGQQTVVTQEPSLTVSPGGTVTITCGS |
| | | | | STGAVTSGNYPNWVQKKPGQAPRGLIGGTKFLAPGTPARFSGSLSGGK |
| | | | | AALTLSGVQPEDEAEYYCVLWYSNRWVFGSGTKLTVLGGGGCPPCPA |
| | | | | PELLGGPSVFLFPPKPKDTLMISRTPEVTCVVVDVSHEEPEVKFNWYVD |
| | | | | GVEVHNAKTKPCEEQYGSTYRCVSVLTVLHQDWLNGKEYKCKVSNK |
| | | | | ALPAPIEKTISKAKGQPREPQVYTLPPSREEMTKNQVSLTCLVKGFYPS |
| | | | | DIAVEWESNGQPENNYKTTPPVLDSDGSFFLYSKLTVDKSRWQQGNVF |
| | | | | SCSVMHEALHNHYTQKSLSLSPGKGGGGQGGGGQGGGGQGGGGQGG |
| | | | | GGQGGGGQCPPCPAPELLGGPSVFLFPPKPKDTLMISRTPEVTCVVVDV |
| | | | | SHEEPEVKFNWYVDGVEVHNAKTKPCEEQYGSTYRCVSVLTVLHQD |
| | | | | WLNGKEYKCKVSNKALPAPIEKTISKAKGQPREPQVYTLPPSREEMTK |
| | | | | NQVSLTCLVKGFYPSDIAVEWESNGQPENNYKTTPPVLDSDGSFFLYS |
| | | | | KLTVDKSRWQQGNVFSCSVMHEALHNHYTQKSLSLSPGK |
| 269. | CD20 82-A3 CC x | arti- | aa | EVQLVESGGGLVQPDRSLRLSCAASGFTFRDYAMHWVRQAPGKCLE |
| | CD22 53-D6 CC | ficial | | WVSGIAWNSDSIGYADSVKGRFTISRDNAKNSLFLQMHSLRPEDTALY |
| | | | | FCAKDTLYGSGSPRAFDIWGQGTMVTVSSGGGGSGGGGSGGGGSEIVL |
| | | | | TQSPATLSVSPGERATLSCRASQSVNNNLAWYQQKPGQAPRLLIYGAS |
| | | | | TRATGIPARFSGSGSGTEFTLTISRLEPEDFAVYYCQQSNNWPITFGCGT |
| | | | | RLEIKSGGGGSQVQLVQSGAEVKKPGASVKVSCKASGYSFTSYGITWV |
| | | | | RQAPGQCLEWMGWISAYNGNTIYAQKLQGRVTMTTDTSTSTAYMEL |
| | | | | RSLRSDDTAVYYCVRDSNHEDFWGQGTLVTVSSGGGGSGGGGSGGG |
| | | | | GSEIVLTQSPATLSVSPGERATLSCRASQSVSSNLAWYQQKPGQAPRLL |
| | | | | IYGASTRATGIPARFSGSGSGTEFTLTISSLQSEDFAVYYCQQYHTWPPV |
| | | | | TFGCGTKVEIK |
| 270. | CD20 82-A3 CC x | arti- | aa | EVQLVESGGGLVQPDRSLRLSCAASGFTFRDYAMHWVRQAPGKCLE |
| | CD22 53-D6 CC | ficial | | WVSGIAWNSDSIGYADSVKGRFTISRDNAKNSLFLQMHSLRPEDTALY |
| | clipopt | | | FCAKDTLYGSGSPRAFDIWGQGTMVTVSSGGGGQGGGGQGGGGQEIV |
| | | | | LTQSPATLSVSPGERATLSCRASQSVNNNLAWYQQKPGQAPRLLIYGA |
| | | | | STRATGIPARFSGSGSGTEFTLTISRLEPEDFAVYYCQQSNNWPITFGCG |
| | | | | TRLEIKSGGGGQQVQLVQSGAEVKKPGASVKVSCKASGYSFTSYGITW |
| | | | | VRQAPGQCLEWMGWISAYNGNTIYAQKLQGRVTMTTDTSTSTAYME |
| | | | | LRSLRSDDTAVYYCVRDSNHEDFWGQGTLVTVSSGGGGQGGGGQGG |
| | | | | GGQEIVLTQSPATLSVSPGERATLSCRASQSVSSNLAWYQQKPGQAPR |
| | | | | LLIYGASTRATGIPARFSGSGSGTEFTLTISSLQSEDFAVYYCQQYHTWP |
| | | | | PVTFGCGTKVEIK |
| 271. | CD20 82-A3 CC x | arti- | aa | EVQLVESGGGLVQPDRSLRLSCAASGFTFRDYAMHWVRQAPGKCLE |
| | CD22 53-D6 CC x | ficial | | WVSGIAWNSDSIGYADSVKGRFTISRDNAKNSLFLQMHSLRPEDTALY |
| | I2C | | | FCAKDTLYGSGSPRAFDIWGQGTMVTVSSGGGGSGGGGSGGGGSEIVL |
| | | | | TQSPATLSVSPGERATLSCRASQSVNNNLAWYQQKPGQAPRLLIYGAS |
| | | | | TRATGIPARFSGSGSGTEFTLTISRLEPEDFAVYYCQQSNNWPITFGCGT |
| | | | | RLEIKSGGGGSQVQLVQSGAEVKKPGASVKVSCKASGYSFTSYGITWV |
| | | | | RQAPGQCLEWMGWISAYNGNTIYAQKLQGRVTMTTDTSTSTAYMEL |
| | | | | RSLRSDDTAVYYCVRDSNHEDFWGQGTLVTVSSGGGGSGGGGSGGG |
| | | | | GSEIVLTQSPATLSVSPGERATLSCRASQSVSSNLAWYQQKPGQAPRLL |
| | | | | IYGASTRATGIPARFSGSGSGTEFTLTISSLQSEDFAVYYCQQYHTWPPV |
| | | | | TFGCGTKVEIKSGGGGSEVQLVESGGGLVQPGGSLKLSCAASGFTFNK |
| | | | | YAMNWVRQAPGKGLEWVARIRSKYNNYATYYADSVKDRFTISRDDS |
| | | | | KNTAYLQMNNLKTEDTAVYYCVRHGNFGNSYISYWAYWGQGTLVTV |
| | | | | SSGGGGSGGGGSGGGGSQTVVTQEPSLTVSPGGTVTLTCGSSTGAVTS |
| | | | | GNYPNWVQQKPGQAPRGLIGGTKFLAPGTPARFSGSLLGGKAALTLSG |
| | | | | VQPEDEAEYYCVLWYSNRWVFGGGTKLTVL |
| 272. | CD20 82-A3 CC x | arti- | aa | EVQLVESGGGLVQPDRSLRLSCAASGFTFRDYAMHWVRQAPGKCLE |
| | CD22 53-D6 CC x | ficial | | WVSGIAWNSDSIGYADSVKGRFTISRDNAKNSLFLQMHSLRPEDTALY |
| | I2C clipopt | | | FCAKDTLYGSGSPRAFDIWGQGTMVTVSSGGGGQGGGGQGGGGQEIV |
| | | | | LTQSPATLSVSPGERATLSCRASQSVNNNLAWYQQKPGQAPRLLIYGA |
| | | | | STRATGIPARFSGSGSGTEFTLTISRLEPEDFAVYYCQQSNNWPITFGCG |
| | | | | TRLEIKSGGGGQQVQLVQSGAEVKKPGASVKVSCKASGYSFTSYGITW |
| | | | | VRQAPGQCLEWMGWISAYNGNTIYAQKLQGRVTMTTDTSTSTAYME |
| | | | | LRSLRSDDTAVYYCVRDSNHEDFWGQGTLVTVSSGGGGQGGGGQGG |
| | | | | GGQEIVLTQSPATLSVSPGERATLSCRASQSVSSNLAWYQQKPGQAPR |
| | | | | LLIYGASTRATGIPARFSGSGSGTEFTLTISSLQSEDFAVYYCQQYHTWP |
| | | | | PVTFGCGTKVEIKSGGGGQEVQLVESGGGLVQPGGSLKLSCAASGFTF |
| | | | | NKYAMNWVRQAPGKGLEWVARIRSKYNNYATYYADSVKDRFTISRD |
| | | | | DSKNTAYLQMNNLKTEDTAVYYCVRHGNFGNSYISYWAYWGQGTLV |
| | | | | TVSSGGGGQGGGGQGGGGQQTVVTQEPSLTVSPGGTVTLTCGSSTGA |
| | | | | VTSGNYPNWVQQKPGQAPRGLIGGTKFLAPGTPARFSGSLLGGKAALT |
| | | | | LSGVQPEDEAEYYCVLWYSNRWVFGGGTKLTVL |
| 273. | CD20 82-A3 CC x | arti- | aa | EVQLVESGGGLVQPDRSLRLSCAASGFTFRDYAMHWVRQAPGKCLE |
| | CD22 53-D6 CC x | ficial | | WVSGIAWNSDSIGYADSVKGRFTISRDNAKNSLFLQMHSLRPEDTALY |
| | I2E | | | FCAKDTLYGSGSPRAFDIWGQGTMVTVSSGGGGSGGGGSGGGGSEIVL |
| | | | | TQSPATLSVSPGERATLSCRASQSVNNNLAWYQQKPGQAPRLLIYGAS |
| | | | | TRATGIPARFSGSGSGTEFTLTISRLEPEDFAVYYCQQSNNWPITFGCGT |
| | | | | RLEIKSGGGGSQVQLVQSGAEVKKPGASVKVSCKASGYSFTSYGITWV |
| | | | | RQAPGQCLEWMGWISAYNGNTIYAQKLQGRVTMTTDTSTSTAYMEL |
| | | | | RSLRSDDTAVYYCVRDSNHEDFWGQGTLVTVSSGGGGSGGGGSGGG |
| | | | | GSEIVLTQSPATLSVSPGERATLSCRASQSVSSNLAWYQQKPGQAPRLL |
| | | | | IYGASTRATGIPARFSGSGSGTEFTLTISSLQSEDFAVYYCQQYHTWPPV |
| | | | | TFGCGTKVEIKSGGGGSEVQLVESGGGLVQPGGSLKLSCAASGFTFNK |
| | | | | YAINWVRQAPGKGLEWVARIRSKYNNYATYYADAVKDRFTISRDDSK |
| | | | | NTVYLQMNNLKTEDTAVYYCARAGNFGSSYISYWAYWGQGTLVTVS |
| | | | | SGGGGSGGGGSGGGGSQTVVTQEPSLTVSPGGTVTITCGSSTGAVTSG |
| | | | | NYPNWVQKKPGQAPRGLIGGTKFLAPGTPARFSGSLSGGKAALTLSGV |
| | | | | QPEDEAEYYCVLWYSNRWVFGSGTKLTVL |
| 274. | CD20 82-A3 CC x | arti- | aa | EVQLVESGGGLVQPDRSLRLSCAASGFTFRDYAMHWVRQAPGKCLE |
| | CD22 53-D6 CC x | ficial | | WVSGIAWNSDSIGYADSVKGRFTISRDNAKNSLFLQMHSLRPEDTALY |
| | I2E clipopt | | | FCAKDTLYGSGSPRAFDIWGQGTMVTVSSGGGGQGGGGQGGGGQEIV |
| | | | | LTQSPATLSVSPGERATLSCRASQSVNNNLAWYQQKPGQAPRLLIYGA |
| | | | | STRATGIPARFSGSGSGTEFTLTISRLEPEDFAVYYCQQSNNWPITFGCG |
| | | | | TRLEIKSGGGGQQVQLVQSGAEVKKPGASVKVSCKASGYSFTSYGITW |
| | | | | VRQAPGQCLEWMGWISAYNGNTIYAQKLQGRVTMTTDTSTSTAYME |
| | | | | LRSLRSDDTAVYYCVRDSNHEDFWGQGTLVTVSSGGGGQGGGGQGG |
| | | | | GGQEIVLTQSPATLSVSPGERATLSCRASQSVSSNLAWYQQKPGQAPR |
| | | | | LLIYGASTRATGIPARFSGSGSGTEFTLTISSLQSEDFAVYYCQQYHTWP |
| | | | | PVTFGCGTKVEIKSGGGGQEVQLVESGGGLVQPGGSLKLSCAASGFTF |
| | | | | NKYAINWVRQAPGKGLEWVARIRSKYNNYATYYADAVKDRFTISRDD |
| | | | | SKNTVYLQMNNLKTEDTAVYYCARAGNFGSSYISYWAYWGQGTLVT |
| | | | | VSSGGGGQGGGGQGGGGQQTVVTQEPSLTVSPGGTVTITCGSSTGAVT |
| | | | | SGNYPNWVQKKPGQAPRGLIGGTKFLAPGTPARFSGSLSGGKAALTLS |
| | | | | GVQPEDEAEYYCVLWYSNRWVFGSGTKLTVL |
| 275. | CD20 82-A3 CC x | arti- | aa | EVQLVESGGGLVQPDRSLRLSCAASGFTFRDYAMHWVRQAPGKCLE |
| | CD22 53-D6 CC x | ficial | | WVSGIAWNSDSIGYADSVKGRFTISRDNAKNSLFLQMHSLRPEDTALY |
| | I2C x scFc | | | FCAKDTLYGSGSPRAFDIWGQGTMVTVSSGGGGSGGGGSGGGGSEIVL |
| | | | | TQSPATLSVSPGERATLSCRASQSVNNNLAWYQQKPGQAPRLLIYGAS |
| | | | | TRATGIPARFSGSGSGTEFTLTISRLEPEDFAVYYCQQSNNWPITFGCGT |
| | | | | RLEIKSGGGGSQVQLVQSGAEVKKPGASVKVSCKASGYSFTSYGITWV |
| | | | | RQAPGQCLEWMGWISAYNGNTIYAQKLQGRVTMTTDTSTSTAYMEL |
| | | | | RSLRSDDTAVYYCVRDSNHEDFWGQGTLVTVSSGGGGGGGGSGGG |
| | | | | GSEIVLTQSPATLSVSPGERATLSCRASQSVSSNLAWYQQKPGQAPRLL |
| | | | | IYGASTRATGIPARFSGSGSGTEFTLTISSLQSEDFAVYYCQQYHTWPPV |
| | | | | TFGCGTKVEIKSGGGGSEVQLVESGGGLVQPGGSLKLSCAASGFTFNK |
| | | | | YAMNWVRQAPGKGLEWVARIRSKYNNYATYYADSVKDRFTISRDDS |
| | | | | KNTAYLQMNNLKTEDTAVYYCVRHGNFGNSYISYWAYWGQGTLVTV |
| | | | | SSGGGGSGGGGSGGGGSQTVVTQEPSLTVSPGGTVTLTCGSSTGAVTS |
| | | | | GNYPNWVQQKPGQAPRGLIGGTKFLAPGTPARFSGSLLGGKAALTLSG |
| | | | | VQPEDEAEYYCVLWYSNRWVFGGGTKLTVLGGGGDKTHTCPPCPAPE |
| | | | | LLGGPSVFLFPPKPKDTLMISRTPEVTCVVVDVSHEDPEVKFNWYVDG |
| | | | | VEVHNAKTKPCEEQYGSTYRCVSVLTVLHQDWLNGKEYKCKVSNKA |
| | | | | LPAPIEKTISKAKGQPREPQVYTLPPSREEMTKNQVSLTCLVKGFYPSDI |
| | | | | AVEWESNGQPENNYKTTPPVLDSDGSFFLYSKLTVDKSRWQQGNVFS |
| | | | | CSVMHEALHNHYTQKSLSLSPGKGGGGGGGGSGGGGSGGGGSGGG |
| | | | | GSGGGGSDKTHTCPPCPAPELLGGPSVFLFPPKPKDTLMISRTPEVTCV |
| | | | | VVDVSHEDPEVKFNWYVDGVEVHNAKTKPCEEQYGSTYRCVSVLTV |
| | | | | LHQDWLNGKEYKCKVSNKALPAPIEKTISKAKGQPREPQVYTLPPSRE |
| | | | | EMTKNQVSLTCLVKGFYPSDIAVEWESNGQPENNYKTTPPVLDSDGSF |
| | | | | FLYSKLTVDKSRWQQGNVFSCSVMHEALHNHYTQKSLSLSPGK |
| 276. | CD20 82-A3 CC x | arti- | aa | EVQLVESGGGLVQPDRSLRLSCAASGFTFRDYAMHWVRQAPGKCLE |
| | CD22 53-D6 CC x | ficial | | WVSGIAWNSDSIGYADSVKGRFTISRDNAKNSLFLQMHSLRPEDTALY |
| | I2C x scFc | | | FCAKDTLYGSGSPRAFDIWGQGTMVTVSSGGGGQGGGGQGGGGQEIV |
| | clipopt | | | LTQSPATLSVSPGERATLSCRASQSVNNNLAWYQQKPGQAPRLLIYGA |
| | | | | STRATGIPARFSGSGSGTEFTLTISRLEPEDFAVYYCQQSNNWPITFGCG |
| | | | | TRLEIKSGGGGQQVQLVQSGAEVKKPGASVKVSCKASGYSFTSYGITW |
| | | | | VRQAPGQCLEWMGWISAYNGNTIYAQKLQGRVTMTTDTSTSTAYME |
| | | | | LRSLRSDDTAVYYCVRDSNHEDFWGQGTLVTVSSGGGGQGGGGQGG |
| | | | | GGQEIVLTQSPATLSVSPGERATLSCRASQSVSSNLAWYQQKPGQAPR |
| | | | | LLIYGASTRATGIPARFSGSGSGTEFTLTISSLQSEDFAVYYCQQYHTWP |
| | | | | PVTFGCGTKVEIKSGGGGQEVQLVESGGGLVQPGGSLKLSCAASGFTF |
| | | | | NKYAMNWVRQAPGKGLEWVARIRSKYNNYATYYADSVKDRFTISRD |
| | | | | DSKNTAYLQMNNLKTEDTAVYYCVRHGNFGNSYISYWAYWGQGTLV |
| | | | | TVSSGGGGQGGGGQGGGGQQTVVTQEPSLTVSPGGTVTLTCGSSTGA |
| | | | | VTSGNYPNWVQQKPGQAPRGLIGGTKFLAPGTPARFSGSLLGGKAALT |
| | | | | LSGVQPEDEAEYYCVLWYSNRWVFGGGTKLTVLGGGGCPPCPAPELL |
| | | | | GGPSVFLFPPKPKDTLMISRTPEVTCVVVDVSHEEPEVKFNWYVDGVE |
| | | | | VHNAKTKPCEEQYGSTYRCVSVLTVLHQDWLNGKEYKCKVSNKALP |
| | | | | APIEKTISKAKGQPREPQVYTLPPSREEMTKNQVSLTCLVKGFYPSDIA |
| | | | | VEWESNGQPENNYKTTPPVLDSDGSFFLYSKLTVDKSRWQQGNVFSCS |
| | | | | VMHEALHNHYTQKSLSLSPGKGGGGQGGGGQGGGGQGGGGQGGGG |
| | | | | QGGGGQCPPCPAPELLGGPSVFLFPPKPKDTLMISRTPEVTCVVVDVSH |
| | | | | EEPEVKFNWYVDGVEVHNAKTKPCEEQYGSTYRCVSVLTVLHQDWL |
| | | | | NGKEYKCKVSNKALPAPIEKTISKAKGQPREPQVYTLPPSREEMTKNQ |
| | | | | VSLTCLVKGFYPSDIAVEWESNGQPENNYKTTPPVLDSDGSFFLYSKLT |
| | | | | VDKSRWQQGNVFSCSVMHEALHNHYTQKSLSLSPGK |
| 277. | CD20 82-A3 CC x | arti- | aa | EVQLVESGGGLVQPDRSLRLSCAASGFTFRDYAMHWVRQAPGKCLE |
| | CD22 53-D6 CC x | ficial | | WVSGIAWNSDSIGYADSVKGRFTISRDNAKNSLFLQMHSLRPEDTALY |
| | I2E x scFc | | | FCAKDTLYGSGSPRAFDIWGQGTMVTVSSGGGGSGGGGSGGGGSEIVL |
| | | | | TQSPATLSVSPGERATLSCRASQSVNNNLAWYQQKPGQAPRLLIYGAS |
| | | | | TRATGIPARFSGSGSGTEFTLTISRLEPEDFAVYYCQQSNNWPITFGCGT |
| | | | | RLEIKSGGGGSQVQLVQSGAEVKKPGASVKVSCKASGYSFTSYGITWV |
| | | | | RQAPGQCLEWMGWISAYNGNTIYAQKLQGRVTMTTDTSTSTAYMEL |
| | | | | RSLRSDDTAVYYCVRDSNHEDFWGQGTLVTVSSGGGGSGGGGSGGG |
| | | | | GSEIVLTQSPATLSVSPGERATLSCRASQSVSSNLAWYQQKPGQAPRLL |
| | | | | IYGASTRATGIPARFSGSGSGTEFTLTISSLQSEDFAVYYCQQYHTWPPV |
| | | | | TFGCGTKVEIKSGGGGSEVQLVESGGGLVQPGGSLKLSCAASGFTFNK |
| | | | | YAINWVRQAPGKGLEWVARIRSKYNNYATYYADAVKDRFTISRDDSK |
| | | | | NTVYLQMNNLKTEDTAVYYCARAGNFGSSYISYWAYWGQGTLVTVS |
| | | | | SGGGGSGGGGSGGGGSQTVVTQEPSLTVSPGGTVTITCGSSTGAVTSG |
| | | | | NYPNWVQKKPGQAPRGLIGGTKFLAPGTPARFSGSLSGGKAALTLSGV |
| | | | | QPEDEAEYYCVLWYSNRWVFGSGTKLTVLGGGGDKTHTCPPCPAPEL |
| | | | | LGGPSVFLFPPKPKDTLMISRTPEVTCVVVDVSHEDPEVKFNWYVDGV |
| | | | | EVHNAKTKPCEEQYGSTYRCVSVLTVLHQDWLNGKEYKCKVSNKAL |
| | | | | PAPIEKTISKAKGQPREPQVYTLPPSREEMTKNQVSLTCLVKGFYPSDIA |
| | | | | VEWESNGQPENNYKTTPPVLDSDGSFFLYSKLTVDKSRWQQGNVFSCS |
| | | | | VMHEALHNHYTQKSLSLSPGKGGGGSGGGGSGGGGSGGGGSGGGGS |
| | | | | GGGGSDKTHTCPPCPAPELLGGPSVFLFPPKPKDTLMISRTPEVTCVVV |
| | | | | DVSHEDPEVKFNWYVDGVEVHNAKTKPCEEQYGSTYRCVSVLTVLH |
| | | | | QDWLNGKEYKCKVSNKALPAPIEKTISKAKGQPREPQVYTLPPSREEM |
| | | | | TKNQVSLTCLVKGFYPSDIAVEWESNGQPENNYKTTPPVLDSDGSFFL |
| | | | | YSKLTVDKSRWQQGNVFSCSVMHEALHNHYTQKSLSLSPGK |
| 278. | CD20 82-A3 CC x | arti- | aa | EVQLVESGGGLVQPDRSLRLSCAASGFTFRDYAMHWVRQAPGKCLE |
| | CD22 53-D6 CC x | ficial | | WVSGIAWNSDSIGYADSVKGRFTISRDNAKNSLFLQMHSLRPEDTALY |
| | I2E x scFc | | | FCAKDTLYGSGSPRAFDIWGQGTMVTVSSGGGGQGGGGQGGGGQEIV |
| | clipopt | | | LTQSPATLSVSPGERATLSCRASQSVNNNLAWYQQKPGQAPRLLIYGA |
| | | | | STRATGIPARFSGSGSGTEFTLTISRLEPEDFAVYYCQQSNNWPITFGCG |
| | | | | TRLEIKSGGGGQQVQLVQSGAEVKKPGASVKVSCKASGYSFTSYGITW |
| | | | | VRQAPGQCLEWMGWISAYNGNTIYAQKLQGRVTMTTDTSTSTAYME |
| | | | | LRSLRSDDTAVYYCVRDSNHEDFWGQGTLVTVSSGGGGQGGGGQGG |
| | | | | GGQEIVLTQSPATLSVSPGERATLSCRASQSVSSNLAWYQQKPGQAPR |
| | | | | LLIYGASTRATGIPARFSGSGSGTEFTLTISSLQSEDFAVYYCQQYHTWP |
| | | | | PVTFGCGTKVEIKSGGGGQEVQLVESGGGLVQPGGSLKLSCAASGFTF |
| | | | | NKYAINWVRQAPGKGLEWVARIRSKYNNYATYYADAVKDRFTISRDD |
| | | | | SKNTVYLQMNNLKTEDTAVYYCARAGNFGSSYISYWAYWGQGTLVT |
| | | | | VSSGGGGQGGGGQGGGGQQTVVTQEPSLTVSPGGTVTITCGSSTGAVT |
| | | | | SGNYPNWVQKKPGQAPRGLIGGTKFLAPGTPARFSGSLSGGKAALTLS |
| | | | | GVQPEDEAEYYCVLWYSNRWVFGSGTKLTVLGGGGCPPCPAPELLGG |
| | | | | PSVFLFPPKPKDTLMISRTPEVTCVVVDVSHEEPEVKFNWYVDGVEVH |
| | | | | NAKTKPCEEQYGSTYRCVSVLTVLHQDWLNGKEYKCKVSNKALPAPI |
| | | | | EKTISKAKGQPREPQVYTLPPSREEMTKNQVSLTCLVKGFYPSDIAVEW |
| | | | | ESNGQPENNYKTTPPVLDSDGSFFLYSKLTVDKSRWQQGNVFSCSVM |
| | | | | HEALHNHYTQKSLSLSPGKGGGGQGGGGQGGGGQGGGGQGGGGQG |
| | | | | GGGQCPPCPAPELLGGPSVFLFPPKPKDTLMISRTPEVTCVVVDVSHEE |
| | | | | PEVKFNWYVDGVEVHNAKTKPCEEQYGSTYRCVSVLTVLHQDWLNG |
| | | | | KEYKCKVSNKALPAPIEKTISKAKGQPREPQVYTLPPSREEMTKNQVSL |
| | | | | TCLVKGFYPSDIAVEWESNGQPENNYKTTPPVLDSDGSFFLYSKLTVD |
| | | | | KSRWQQGNVFSCSVMHEALHNHYTQKSLSLSPGK |
| 279. | CD20 82-A3 CC x | arti- | aa | EVQLVESGGGLVQPDRSLRLSCAASGFTFRDYAMHWVRQAPGKCLE |
| | CD22 53-G9 CC | ficial | | WVSGIAWNSDSIGYADSVKGRFTISRDNAKNSLFLQMHSLRPEDTALY |
| | | | | FCAKDTLYGSGSPRAFDIWGQGTMVTVSSGGGGSGGGGSGGGGSEIVL |
| | | | | TQSPATLSVSPGERATLSCRASQSVNNNLAWYQQKPGQAPRLLIYGAS |
| | | | | TRATGIPARFSGSGSGTEFTLTISRLEPEDFAVYYCQQSNNWPITFGCGT |
| | | | | RLEIKSGGGGSQVQLVQSGAEVKKPGESLKISCKGSGYSFTSYGISWVR |
| | | | | QAPGQCLEWMGWISAYNGNTIYAQKLQGRVTMTTDTSTSTAYMELR |
| | | | | RLRSDDTAVYYCARDPGVTGDDYWGQGTLVTVSSGGGGSGGGGSGG |
| | | | | GGSEIVLTQSPATLSVSPGERATLSCRASLSVSSNLAWYQQKPGQAPRL |
| | | | | LIYGASTRATGIPARFSGSGSGTEFTLTISSLQSEDFAVYFCQQYHSWPA |
| | | | | LTFGCGTKVEIK |
| 280. | CD20 82-A3 CC x | arti- | aa | EVQLVESGGGLVQPDRSLRLSCAASGFTFRDYAMHWVRQAPGKCLE |
| | CD22 53-G9 CC | ficial | | WVSGIAWNSDSIGYADSVKGRFTISRDNAKNSLFLQMHSLRPEDTALY |
| | clipopt | | | FCAKDTLYGSGSPRAFDIWGQGTMVTVSSGGGGQGGGGQGGGGQEIV |
| | | | | LTQSPATLSVSPGERATLSCRASQSVNNNLAWYQQKPGQAPRLLIYGA |
| | | | | STRATGIPARFSGSGSGTEFTLTISRLEPEDFAVYYCQQSNNWPITFGCG |
| | | | | TRLEIKSGGGGQQVQLVQSGAEVKKPGESLKISCKGSGYSFTSYGISWV |
| | | | | RQAPGQCLEWMGWISAYNGNTIYAQKLQGRVTMTTDTSTSTAYMEL |
| | | | | RRLRSDDTAVYYCARDPGVTGDDYWGQGTLVTVSSGGGGQGGGGQG |
| | | | | GGGQEIVLTQSPATLSVSPGERATLSCRASLSVSSNLAWYQQKPGQAP |
| | | | | RLLIYGASTRATGIPARFSGSGSGTEFTLTISSLQSEDFAVYFCQQYHSW |
| | | | | PALTFGCGTKVEIK |
| 281. | CD20 82-A3 CC x | arti- | aa | EVQLVESGGGLVQPDRSLRLSCAASGFTFRDYAMHWVRQAPGKCLE |
| | CD22 53-G9 CC x | ficial | | WVSGIAWNSDSIGYADSVKGRFTISRDNAKNSLFLQMHSLRPEDTALY |
| | I2C | | | FCAKDTLYGSGSPRAFDIWGQGTMVTVSSGGGGSGGGGSGGGGSEIVL |
| | | | | TQSPATLSVSPGERATLSCRASQSVNNNLAWYQQKPGQAPRLLIYGAS |
| | | | | TRATGIPARFSGSGSGTEFTLTISRLEPEDFAVYYCQQSNNWPITFGCGT |
| | | | | RLEIKSGGGGSQVQLVQSGAEVKKPGESLKISCKGSGYSFTSYGISWVR |
| | | | | QAPGQCLEWMGWISAYNGNTIYAQKLQGRVTMTTDTSTSTAYMELR |
| | | | | RLRSDDTAVYYCARDPGVTGDDYWGQGTLVTVSSGGGGSGGGGSGG |
| | | | | GGSEIVLTQSPATLSVSPGERATLSCRASLSVSSNLAWYQQKPGQAPRL |
| | | | | LIYGASTRATGIPARFSGSGSGTEFTLTISSLQSEDFAVYFCQQYHSWPA |
| | | | | LTFGCGTKVEIKSGGGGSEVQLVESGGGLVQPGGSLKLSCAASGFTFN |
| | | | | KYAMNWVRQAPGKGLEWVARIRSKYNNYATYYADSVKDRFTISRDD |
| | | | | SKNTAYLQMNNLKTEDTAVYYCVRHGNFGNSYISYWAYWGQGTLVT |
| | | | | VSSGGGGSGGGGSGGGGSQTVVTQEPSLTVSPGGTVTLTCGSSTGAVT |
| | | | | SGNYPNWVQQKPGQAPRGLIGGTKFLAPGTPARFSGSLLGGKAALTLS |
| | | | | GVQPEDEAEYYCVLWYSNRWVFGGGTKLTVL |
| 282. | CD20 82-A3 CC x | arti- | aa | EVQLVESGGGLVQPDRSLRLSCAASGFTFRDYAMHWVRQAPGKCLE |
| | CD22 53-G9 CC x | ficial | | WVSGIAWNSDSIGYADSVKGRFTISRDNAKNSLFLQMHSLRPEDTALY |
| | I2C clipopt | | | FCAKDTLYGSGSPRAFDIWGQGTMVTVSSGGGGQGGGGQGGGGQEIV |
| | | | | LTQSPATLSVSPGERATLSCRASQSVNNNLAWYQQKPGQAPRLLIYGA |
| | | | | STRATGIPARFSGSGSGTEFTLTISRLEPEDFAVYYCQQSNNWPITFGCG |
| | | | | TRLEIKSGGGGQQVQLVQSGAEVKKPGESLKISCKGSGYSFTSYGISWV |
| | | | | RQAPGQCLEWMGWISAYNGNTIYAQKLQGRVTMTTDTSTSTAYMEL |
| | | | | RRLRSDDTAVYYCARDPGVTGDDYWGQGTLVTVSSGGGGQGGGGQG |
| | | | | GGGQEIVLTQSPATLSVSPGERATLSCRASLSVSSNLAWYQQKPGQAP |
| | | | | RLLIYGASTRATGIPARFSGSGSGTEFTLTISSLQSEDFAVYFCQQYHSW |
| | | | | PALTFGCGTKVEIKSGGGGQEVQLVESGGGLVQPGGSLKLSCAASGFT |
| | | | | FNKYAMNWVRQAPGKGLEWVARIRSKYNNYATYYADSVKDRFTISR |
| | | | | DDSKNTAYLQMNNLKTEDTAVYYCVRHGNFGNSYISYWAYWGQGTL |
| | | | | VTVSSGGGGQGGGGQGGGGQQTVVTQEPSLTVSPGGTVTLTCGSSTG |
| | | | | AVTSGNYPNWVQQKPGQAPRGLIGGTKFLAPGTPARFSGSLLGGKAAL |
| | | | | TLSGVQPEDEAEYYCVLWYSNRWVFGGGTKLTVL |
| 283. | CD20 82-A3 CC x | arti- | aa | EVQLVESGGGLVQPDRSLRLSCAASGFTFRDYAMHWVRQAPGKCLE |
| | CD22 53-G9 CC x | ficial | | WVSGIAWNSDSIGYADSVKGRFTISRDNAKNSLFLQMHSLRPEDTALY |
| | I2E | | | FCAKDTLYGSGSPRAFDIWGQGTMVTVSSGGGGSGGGGSGGGGSEIVL |
| | | | | TQSPATLSVSPGERATLSCRASQSVNNNLAWYQQKPGQAPRLLIYGAS |
| | | | | TRATGIPARFSGSGSGTEFTLTISRLEPEDFAVYYCQQSNNWPITFGCGT |
| | | | | RLEIKSGGGGSQVQLVQSGAEVKKPGESLKISCKGSGYSFTSYGISWVR |
| | | | | QAPGQCLEWMGWISAYNGNTIYAQKLQGRVTMTTDTSTSTAYMELR |
| | | | | RLRSDDTAVYYCARDPGVTGDDYWGQGTLVTVSSGGGGSGGGGSGG |
| | | | | GGSEIVLTQSPATLSVSPGERATLSCRASLSVSSNLAWYQQKPGQAPRL |
| | | | | LIYGASTRATGIPARFSGSGSGTEFTLTISSLQSEDFAVYFCQQYHSWPA |
| | | | | LTFGCGTKVEIKSGGGGSEVQLVESGGGLVQPGGSLKLSCAASGFTFN |
| | | | | KYAINWVRQAPGKGLEWVARIRSKYNNYATYYADAVKDRFTISRDDS |
| | | | | KNTVYLQMNNLKTEDTAVYYCARAGNFGSSYISYWAYWGQGTLVTV |
| | | | | SSGGGGSGGGGSGGGGSQTVVTQEPSLTVSPGGTVTITCGSSTGAVTSG |
| | | | | NYPNWVQKKPGQAPRGLIGGTKFLAPGTPARFSGSLSGGKAALTLSGV |
| | | | | QPEDEAEYYCVLWYSNRWVFGSGTKLTVL |
| 284. | CD20 82-A3 CC x | arti- | aa | EVQLVESGGGLVQPDRSLRLSCAASGFTFRDYAMHWVRQAPGKCLE |
| | CD22 53-G9 CC x | ficial | | WVSGIAWNSDSIGYADSVKGRFTISRDNAKNSLFLQMHSLRPEDTALY |
| | I2E clipopt | | | FCAKDTLYGSGSPRAFDIWGQGTMVTVSSGGGGQGGGGQGGGGQEIV |
| | | | | LTQSPATLSVSPGERATLSCRASQSVNNNLAWYQQKPGQAPRLLIYGA |
| | | | | STRATGIPARFSGSGSGTEFTLTISRLEPEDFAVYYCQQSNNWPITFGCG |
| | | | | TRLEIKSGGGGQQVQLVQSGAEVKKPGESLKISCKGSGYSFTSYGISWV |
| | | | | RQAPGQCLEWMGWISAYNGNTIYAQKLQGRVTMTTDTSTSTAYMEL |
| | | | | RRLRSDDTAVYYCARDPGVTGDDYWGQGTLVTVSSGGGGQGGGGQG |
| | | | | GGGQEIVLTQSPATLSVSPGERATLSCRASLSVSSNLAWYQQKPGQAP |
| | | | | RLLIYGASTRATGIPARFSGSGSGTEFTLTISSLQSEDFAVYFCQQYHSW |
| | | | | PALTFGCGTKVEIKSGGGGQEVQLVESGGGLVQPGGSLKLSCAASGFT |
| | | | | FNKYAINWVRQAPGKGLEWVARIRSKYNNYATYYADAVKDRFTISRD |
| | | | | DSKNTVYLQMNNLKTEDTAVYYCARAGNFGSSYISYWAYWGQGTLV |
| | | | | TVSSGGGGQGGGGQGGGGQQTVVTQEPSLTVSPGGTVTITCGSSTGAV |
| | | | | TSGNYPNWVQKKPGQAPRGLIGGTKFLAPGTPARFSGSLSGGKAALTL |
| | | | | SGVQPEDEAEYYCVLWYSNRWVFGSGTKLTVL |
| 285. | CD20 82-A3 CC x | arti- | aa | EVQLVESGGGLVQPDRSLRLSCAASGFTFRDYAMHWVRQAPGKCLE |
| | CD22 53-G9 CC x | ficial | | WVSGIAWNSDSIGYADSVKGRFTISRDNAKNSLFLQMHSLRPEDTALY |
| | I2C x scFc | | | FCAKDTLYGSGSPRAFDIWGQGTMVTVSSGGGGSGGGGSGGGGSEIVL |
| | | | | TQSPATLSVSPGERATLSCRASQSVNNNLAWYQQKPGQAPRLLIYGAS |
| | | | | TRATGIPARFSGSGSGTEFTLTISRLEPEDFAVYYCQQSNNWPITFGCGT |
| | | | | RLEIKSGGGGSQVQLVQSGAEVKKPGESLKISCKGSGYSFTSYGISWVR |
| | | | | QAPGQCLEWMGWISAYNGNTIYAQKLQGRVTMTTDTSTSTAYMELR |
| | | | | RLRSDDTAVYYCARDPGVTGDDYWGQGTLVTVSSGGGGSGGGGSGG |
| | | | | GGSEIVLTQSPATLSVSPGERATLSCRASLSVSSNLAWYQQKPGQAPRL |
| | | | | LIYGASTRATGIPARFSGSGSGTEFTLTISSLQSEDFAVYFCQQYHSWPA |
| | | | | LTFGCGTKVEIKSGGGGSEVQLVESGGGLVQPGGSLKLSCAASGFTFN |
| | | | | KYAMNWVRQAPGKGLEWVARIRSKYNNYATYYADSVKDRFTISRDD |
| | | | | SKNTAYLQMNNLKTEDTAVYYCVRHGNFGNSYISYWAYWGQGTLVT |
| | | | | VSSGGGGSGGGGSGGGGSQTVVTQEPSLTVSPGGTVTLTCGSSTGAVT |
| | | | | SGNYPNWVQQKPGQAPRGLIGGTKFLAPGTPARFSGSLLGGKAALTLS |
| | | | | GVQPEDEAEYYCVLWYSNRWVFGGGTKLTVLGGGGDKTHTCPPCPA |
| | | | | PELLGGPSVFLFPPKPKDTLMISRTPEVTCVVVDVSHEDPEVKFNWYV |
| | | | | DGVEVHNAKTKPCEEQYGSTYRCVSVLTVLHQDWLNGKEYKCKVSN |
| | | | | KALPAPIEKTISKAKGQPREPQVYTLPPSREEMTKNQVSLTCLVKGFYP |
| | | | | SDIAVEWESNGQPENNYKTTPPVLDSDGSFFLYSKLTVDKSRWQQGNV |
| | | | | FSCSVMHEALHNHYTQKSLSLSPGKGGGGSGGGGSGGGGSGGGGSGG |
| | | | | GGSGGGGSDKTHTCPPCPAPELLGGPSVFLFPPKPKDTLMISRTPEVTC |
| | | | | VVVDVSHEDPEVKFNWYVDGVEVHNAKTKPCEEQYGSTYRCVSVLT |
| | | | | VLHQDWLNGKEYKCKVSNKALPAPIEKTISKAKGQPREPQVYTLPPSR |
| | | | | EEMTKNQVSLTCLVKGFYPSDIAVEWESNGQPENNYKTTPPVLDSDGS |
| | | | | FFLYSKLTVDKSRWQQGNVFSCSVMHEALHNHYTQKSLSLSPGK |
| 286. | CD20 82-A3 CC x | arti- | aa | EVQLVESGGGLVQPDRSLRLSCAASGFTFRDYAMHWVRQAPGKCLE |
| | CD22 53-G9 CC x | ficial | | WVSGIAWNSDSIGYADSVKGRFTISRDNAKNSLFLQMHSLRPEDTALY |
| | I2C x scFc | | | FCAKDTLYGSGSPRAFDIWGQGTMVTVSSGGGGQGGGGQGGGGQEIV |
| | clipopt | | | LTQSPATLSVSPGERATLSCRASQSVNNNLAWYQQKPGQAPRLLIYGA |
| | | | | STRATGIPARFSGSGSGTEFTLTISRLEPEDFAVYYCQQSNNWPITFGCG |
| | | | | TRLEIKSGGGGQQVQLVQSGAEVKKPGESLKISCKGSGYSFTSYGISWV |
| | | | | RQAPGQCLEWMGWISAYNGNTIYAQKLQGRVTMTTDTSTSTAYMEL |
| | | | | RRLRSDDTAVYYCARDPGVTGDDYWGQGTLVTVSSGGGGQGGGGQG |
| | | | | GGGQEIVLTQSPATLSVSPGERATLSCRASLSVSSNLAWYQQKPGQAP |
| | | | | RLLIYGASTRATGIPARFSGSGSGTEFTLTISSLQSEDFAVYFCQQYHSW |
| | | | | PALTFGCGTKVEIKSGGGGQEVQLVESGGGLVQPGGSLKLSCAASGFT |
| | | | | FNKYAMNWVRQAPGKGLEWVARIRSKYNNYATYYADSVKDRFTISR |
| | | | | DDSKNTAYLQMNNLKTEDTAVYYCVRHGNFGNSYISYWAYWGQGTL |
| | | | | VTVSSGGGGQGGGGQGGGGQQTVVTQEPSLTVSPGGTVTLTCGSSTG |
| | | | | AVTSGNYPNWVQQKPGQAPRGLIGGTKFLAPGTPARFSGSLLGGKAAL |
| | | | | TLSGVQPEDEAEYYCVLWYSNRWVFGGGTKLTVLGGGGCPPCPAPEL |
| | | | | LGGPSVFLFPPKPKDTLMISRTPEVTCVVVDVSHEEPEVKFNWYVDGV |
| | | | | EVHNAKTKPCEEQYGSTYRCVSVLTVLHQDWLNGKEYKCKVSNKAL |
| | | | | PAPIEKTISKAKGQPREPQVYTLPPSREEMTKNQVSLTCLVKGFYPSDIA |
| | | | | VEWESNGQPENNYKTTPPVLDSDGSFFLYSKLTVDKSRWQQGNVFSCS |
| | | | | VMHEALHNHYTQKSLSLSPGKGGGGQGGGGQGGGGQGGGGQGGGG |
| | | | | QGGGGQCPPCPAPELLGGPSVFLFPPKPKDTLMISRTPEVTCVVVDVSH |
| | | | | EEPEVKFNWYVDGVEVHNAKTKPCEEQYGSTYRCVSVLTVLHQDWL |
| | | | | NGKEYKCKVSNKALPAPIEKTISKAKGQPREPQVYTLPPSREEMTKNQ |
| | | | | VSLTCLVKGFYPSDIAVEWESNGQPENNYKTTPPVLDSDGSFFLYSKLT |
| | | | | VDKSRWQQGNVFSCSVMHEALHNHYTQKSLSLSPGK |
| 287. | CD20 82-A3 CC x | arti- | aa | EVQLVESGGGLVQPDRSLRLSCAASGFTFRDYAMHWVRQAPGKCLE |
| | CD22 53-G9 CC x | ficial | | WVSGIAWNSDSIGYADSVKGRFTISRDNAKNSLFLQMHSLRPEDTALY |
| | I2E x scFc | | | FCAKDTLYGSGSPRAFDIWGQGTMVTVSSGGGGSGGGGSGGGGSEIVL |
| | | | | TQSPATLSVSPGERATLSCRASQSVNNNLAWYQQKPGQAPRLLIYGAS |
| | | | | TRATGIPARFSGSGSGTEFTLTISRLEPEDFAVYYCQQSNNWPITFGCGT |
| | | | | RLEIKSGGGGSQVQLVQSGAEVKKPGESLKISCKGSGYSFTSYGISWVR |
| | | | | QAPGQCLEWMGWISAYNGNTIYAQKLQGRVTMTTDTSTSTAYMELR |
| | | | | RLRSDDTAVYYCARDPGVTGDDYWGQGTLVTVSSGGGGSGGGGSGG |
| | | | | GGSEIVLTQSPATLSVSPGERATLSCRASLSVSSNLAWYQQKPGQAPRL |
| | | | | LIYGASTRATGIPARFSGSGSGTEFTLTISSLQSEDFAVYFCQQYHSWPA |
| | | | | LTFGCGTKVEIKSGGGGSEVQLVESGGGLVQPGGSLKLSCAASGFTFN |
| | | | | KYAINWVRQAPGKGLEWVARIRSKYNNYATYYADAVKDRFTISRDDS |
| | | | | KNTVYLQMNNLKTEDTAVYYCARAGNFGSSYISYWAYWGQGTLVTV |
| | | | | SSGGGGSGGGGSGGGGSQTVVTQEPSLTVSPGGTVTITCGSSTGAVTSG |
| | | | | NYPNWVQKKPGQAPRGLIGGTKFLAPGTPARFSGSLSGGKAALTLSGV |
| | | | | QPEDEAEYYCVLWYSNRWVFGSGTKLTVLGGGGDKTHTCPPCPAPEL |
| | | | | LGGPSVFLFPPKPKDTLMISRTPEVTCVVVDVSHEDPEVKFNWYVDGV |
| | | | | EVHNAKTKPCEEQYGSTYRCVSVLTVLHQDWLNGKEYKCKVSNKAL |
| | | | | PAPIEKTISKAKGQPREPQVYTLPPSREEMTKNQVSLTCLVKGFYPSDIA |
| | | | | VEWESNGQPENNYKTTPPVLDSDGSFFLYSKLTVDKSRWQQGNVFSCS |
| | | | | VMHEALHNHYTQKSLSLSPGKGGGGSGGGGSGGGGSGGGGSGGGGS |
| | | | | GGGGSDKTHTCPPCPAPELLGGPSVFLFPPKPKDTLMISRTPEVTCVVV |
| | | | | DVSHEDPEVKFNWYVDGVEVHNAKTKPCEEQYGSTYRCVSVLTVLH |
| | | | | QDWLNGKEYKCKVSNKALPAPIEKTISKAKGQPREPQVYTLPPSREEM |
| | | | | TKNQVSLTCLVKGFYPSDIAVEWESNGQPENNYKTTPPVLDSDGSFFL |
| | | | | YSKLTVDKSRWQQGNVFSCSVMHEALHNHYTQKSLSLSPGK |
| 288. | CD20 82-A3 CC x | arti- | aa | EVQLVESGGGLVQPDRSLRLSCAASGFTFRDYAMHWVRQAPGKCLE |
| | CD22 53-G9 CC x | ficial | | WVSGIAWNSDSIGYADSVKGRFTISRDNAKNSLFLQMHSLRPEDTALY |
| | I2E x scFc | | | FCAKDTLYGSGSPRAFDIWGQGTMVTVSSGGGGQGGGGQGGGGQEIV |
| | clipopt | | | LTQSPATLSVSPGERATLSCRASQSVNNNLAWYQQKPGQAPRLLIYGA |
| | | | | STRATGIPARFSGSGSGTEFTLTISRLEPEDFAVYYCQQSNNWPITFGCG |
| | | | | TRLEIKSGGGGQQVQLVQSGAEVKKPGESLKISCKGSGYSFTSYGISWV |
| | | | | RQAPGQCLEWMGWISAYNGNTIYAQKLQGRVTMTTDTSTSTAYMEL |
| | | | | RRLRSDDTAVYYCARDPGVTGDDYWGQGTLVTVSSGGGGQGGGGQG |
| | | | | GGGQEIVLTQSPATLSVSPGERATLSCRASLSVSSNLAWYQQKPGQAP |
| | | | | RLLIYGASTRATGIPARFSGSGSGTEFTLTISSLQSEDFAVYFCQQYHSW |
| | | | | PALTFGCGTKVEIKSGGGGQEVQLVESGGGLVQPGGSLKLSCAASGFT |
| | | | | FNKYAINWVRQAPGKGLEWVARIRSKYNNYATYYADAVKDRFTISRD |
| | | | | DSKNTVYLQMNNLKTEDTAVYYCARAGNFGSSYISYWAYWGQGTLV |
| | | | | TVSSGGGGQGGGGQGGGGQQTVVTQEPSLTVSPGGTVTITCGSSTGAV |
| | | | | TSGNYPNWVQKKPGQAPRGLIGGTKFLAPGTPARFSGSLSGGKAALTL |
| | | | | SGVQPEDEAEYYCVLWYSNRWVFGSGTKLTVLGGGGCPPCPAPELLG |
| | | | | GPSVFLFPPKPKDTLMISRTPEVTCVVVDVSHEEPEVKFNWYVDGVEV |
| | | | | HNAKTKPCEEQYGSTYRCVSVLTVLHQDWLNGKEYKCKVSNKALPAP |
| | | | | IEKTISKAKGQPREPQVYTLPPSREEMTKNQVSLTCLVKGFYPSDIAVE |
| | | | | WESNGQPENNYKTTPPVLDSDGSFFLYSKLTVDKSRWQQGNVFSCSV |
| | | | | MHEALHNHYTQKSLSLSPGKGGGGQGGGGQGGGGQGGGGQGGGGQ |
| | | | | GGGGQCPPCPAPELLGGPSVFLFPPKPKDTLMISRTPEVTCVVVDVSHE |
| | | | | EPEVKFNWYVDGVEVHNAKTKPCEEQYGSTYRCVSVLTVLHQDWLN |
| | | | | GKEYKCKVSNKALPAPIEKTISKAKGQPREPQVYTLPPSREEMTKNQVS |
| | | | | LTCLVKGFYPSDIAVEWESNGQPENNYKTTPPVLDSDGSFFLYSKLTVD |
| | | | | KSRWQQGNVFSCSVMHEALHNHYTQKSLSLSPGK |
| 289. | CD20 82-A3 CC x | arti- | aa | EVQLVESGGGLVQPDRSLRLSCAASGFTFRDYAMHWVRQAPGKCLE |
| | CD22 76-H4 CC | ficial | | WVSGIAWNSDSIGYADSVKGRFTISRDNAKNSLFLQMHSLRPEDTALY |
| | | | | FCAKDTLYGSGSPRAFDIWGQGTMVTVSSGGGGSGGGGSGGGGSEIVL |
| | | | | TQSPATLSVSPGERATLSCRASQSVNNNLAWYQQKPGQAPRLLIYGAS |
| | | | | TRATGIPARFSGSGSGTEFTLTISRLEPEDFAVYYCQQSNNWPITFGCGT |
| | | | | RLEIKSGGGGSQVQLVQSGAEVKKPGASVKVSCKASGYTFNNYGISW |
| | | | | VRQAPGQCLEWMGWISAYNGKTSYAQKFQGRVTMTTDTSTGTAYME |
| | | | | LRSLRSDDTAVYYCARSTGDGEYWGQGTLVTVSSGGGGSGGGGSGG |
| | | | | GGSEIVMTQSPATLSVSPGERATLSCRASQSVSSNLAWYQQKPGQAPR |
| | | | | LLIYGASTRATGIPARFSGGGSGTEFTLTISSLQSEDFAVYYCQQYHTWP |
| | | | | VLTFGCGTKVEIK |
| 290. | CD20 82-A3 CC x | arti- | aa | EVQLVESGGGLVQPDRSLRLSCAASGFTFRDYAMHWVRQAPGKCLE |
| | CD22 76-H4 CC | ficial | | WVSGIAWNSDSIGYADSVKGRFTISRDNAKNSLFLQMHSLRPEDTALY |
| | clipopt | | | FCAKDTLYGSGSPRAFDIWGQGTMVTVSSGGGGQGGGGQGGGGQEIV |
| | | | | LTQSPATLSVSPGERATLSCRASQSVNNNLAWYQQKPGQAPRLLIYGA |
| | | | | STRATGIPARFSGSGSGTEFTLTISRLEPEDFAVYYCQQSNNWPITFGCG |
| | | | | TRLEIKSGGGGQQVQLVQSGAEVKKPGASVKVSCKASGYTENNYGIS |
| | | | | WVRQAPGQCLEWMGWISAYNGKTSYAQKFQGRVTMTTDTSTGTAY |
| | | | | MELRSLRSDDTAVYYCARSTGDGEYWGQGTLVTVSSGGGGQGGGGQ |
| | | | | GGGGQEIVMTQSPATLSVSPGERATLSCRASQSVSSNLAWYQQKPGQA |
| | | | | PRLLIYGASTRATGIPARFSGGGSGTEFTLTISSLQSEDFAVYYCQQYHT |
| | | | | WPVLTFGCGTKVEIK |
| 291. | CD20 82-A3 CC x | arti- | aa | EVQLVESGGGLVQPDRSLRLSCAASGFTFRDYAMHWVRQAPGKCLE |
| | CD22 76-H4 CC x | ficial | | WVSGIAWNSDSIGYADSVKGRFTISRDNAKNSLFLQMHSLRPEDTALY |
| | I2C | | | FCAKDTLYGSGSPRAFDIWGQGTMVTVSSGGGGSGGGGSGGGGSEIVL |
| | | | | TQSPATLSVSPGERATLSCRASQSVNNNLAWYQQKPGQAPRLLIYGAS |
| | | | | TRATGIPARFSGSGSGTEFTLTISRLEPEDFAVYYCQQSNNWPITFGCGT |
| | | | | RLEIKSGGGGSQVQLVQSGAEVKKPGASVKVSCKASGYTFNNYGISW |
| | | | | VRQAPGQCLEWMGWISAYNGKTSYAQKFQGRVTMTTDTSTGTAYME |
| | | | | LRSLRSDDTAVYYCARSTGDGEYWGQGTLVTVSSGGGGSGGGGSGG |
| | | | | GGSEIVMTQSPATLSVSPGERATLSCRASQSVSSNLAWYQQKPGQAPR |
| | | | | LLIYGASTRATGIPARFSGGGSGTEFTLTISSLQSEDFAVYYCQQYHTWP |
| | | | | VLTFGCGTKVEIKSGGGGSEVQLVESGGGLVQPGGSLKLSCAASGFTF |
| | | | | NKYAMNWVRQAPGKGLEWVARIRSKYNNYATYYADSVKDRFTISRD |
| | | | | DSKNTAYLQMNNLKTEDTAVYYCVRHGNFGNSYISYWAYWGQGTLV |
| | | | | TVSSGGGGSGGGGSGGGGSQTVVTQEPSLTVSPGGTVTLTCGSSTGAV |
| | | | | TSGNYPNWVQQKPGQAPRGLIGGTKFLAPGTPARFSGSLLGGKAALTL |
| | | | | SGVQPEDEAEYYCVLWYSNRWVFGGGTKLTVL |
| 292. | CD20 82-A3 CC x | arti- | aa | EVQLVESGGGLVQPDRSLRLSCAASGFTFRDYAMHWVRQAPGKCLE |
| | CD22 76-H4 CC x | ficial | | WVSGIAWNSDSIGYADSVKGRFTISRDNAKNSLFLQMHSLRPEDTALY |
| | I2C clipopt | | | FCAKDTLYGSGSPRAFDIWGQGTMVTVSSGGGGQGGGGQGGGGQEIV |
| | | | | LTQSPATLSVSPGERATLSCRASQSVNNNLAWYQQKPGQAPRLLIYGA |
| | | | | STRATGIPARFSGSGSGTEFTLTISRLEPEDFAVYYCQQSNNWPITFGCG |
| | | | | TRLEIKSGGGGQQVQLVQSGAEVKKPGASVKVSCKASGYTFNNYGIS |
| | | | | WVRQAPGQCLEWMGWISAYNGKTSYAQKFQGRVTMTTDTSTGTAY |
| | | | | MELRSLRSDDTAVYYCARSTGDGEYWGQGTLVTVSSGGGGQGGGGQ |
| | | | | GGGGQEIVMTQSPATLSVSPGERATLSCRASQSVSSNLAWYQQKPGQA |
| | | | | PRLLIYGASTRATGIPARFSGGGSGTEFTLTISSLQSEDFAVYYCQQYHT |
| | | | | WPVLTFGCGTKVEIKSGGGGQEVQLVESGGGLVQPGGSLKLSCAASGF |
| | | | | TFNKYAMNWVRQAPGKGLEWVARIRSKYNNYATYYADSVKDRFTIS |
| | | | | RDDSKNTAYLQMNNLKTEDTAVYYCVRHGNFGNSYISYWAYWGQGT |
| | | | | LVTVSSGGGGQGGGGQGGGGQQTVVTQEPSLTVSPGGTVTLTCGSST |
| | | | | GAVTSGNYPNWVQQKPGQAPRGLIGGTKFLAPGTPARFSGSLLGGKA |
| | | | | ALTLSGVQPEDEAEYYCVLWYSNRWVFGGGTKLTVL |
| 293. | CD20 82-A3 CC x | arti- | aa | EVQLVESGGGLVQPDRSLRLSCAASGFTFRDYAMHWVRQAPGKCLE |
| | CD22 76-H4 CC x | ficial | | WVSGIAWNSDSIGYADSVKGRFTISRDNAKNSLFLQMHSLRPEDTALY |
| | I2E | | | FCAKDTLYGSGSPRAFDIWGQGTMVTVSSGGGGSGGGGSGGGGSEIVL |
| | | | | TQSPATLSVSPGERATLSCRASQSVNNNLAWYQQKPGQAPRLLIYGAS |
| | | | | TRATGIPARFSGSGSGTEFTLTISRLEPEDFAVYYCQQSNNWPITFGCGT |
| | | | | RLEIKSGGGGSQVQLVQSGAEVKKPGASVKVSCKASGYTFNNYGISW |
| | | | | VRQAPGQCLEWMGWISAYNGKTSYAQKFQGRVTMTTDTSTGTAYME |
| | | | | LRSLRSDDTAVYYCARSTGDGEYWGQGTLVTVSSGGGGSGGGGSGG |
| | | | | GGSEIVMTQSPATLSVSPGERATLSCRASQSVSSNLAWYQQKPGQAPR |
| | | | | LLIYGASTRATGIPARFSGGGSGTEFTLTISSLQSEDFAVYYCQQYHTWP |
| | | | | VLTFGCGTKVEIKSGGGGSEVQLVESGGGLVQPGGSLKLSCAASGFTF |
| | | | | NKYAINWVRQAPGKGLEWVARIRSKYNNYATYYADAVKDRFTISRDD |
| | | | | SKNTVYLQMNNLKTEDTAVYYCARAGNFGSSYISYWAYWGQGTLVT |
| | | | | VSSGGGGSGGGGSGGGGSQTVVTQEPSLTVSPGGTVTITCGSSTGAVTS |
| | | | | GNYPNWVQKKPGQAPRGLIGGTKFLAPGTPARFSGSLSGGKAALTLSG |
| | | | | VQPEDEAEYYCVLWYSNRWVFGSGTKLTVL |
| 294. | CD20 82-A3 CC x | arti- | aa | EVQLVESGGGLVQPDRSLRLSCAASGFTFRDYAMHWVRQAPGKCLE |
| | CD22 76-H4 CC x | ficial | | WVSGIAWNSDSIGYADSVKGRFTISRDNAKNSLFLQMHSLRPEDTALY |
| | I2E clipopt | | | FCAKDTLYGSGSPRAFDIWGQGTMVTVSSGGGGQGGGGQGGGGQEIV |
| | | | | LTQSPATLSVSPGERATLSCRASQSVNNNLAWYQQKPGQAPRLLIYGA |
| | | | | STRATGIPARFSGSGSGTEFTLTISRLEPEDFAVYYCQQSNNWPITFGCG |
| | | | | TRLEIKSGGGGQQVQLVQSGAEVKKPGASVKVSCKASGYTENNYGIS |
| | | | | WVRQAPGQCLEWMGWISAYNGKTSYAQKFQGRVTMTTDTSTGTAY |
| | | | | MELRSLRSDDTAVYYCARSTGDGEYWGQGTLVTVSSGGGGQGGGGQ |
| | | | | GGGGQEIVMTQSPATLSVSPGERATLSCRASQSVSSNLAWYQQKPGQA |
| | | | | PRLLIYGASTRATGIPARFSGGGSGTEFTLTISSLQSEDFAVYYCQQYHT |
| | | | | WPVLTFGCGTKVEIKSGGGGQEVQLVESGGGLVQPGGSLKLSCAASGF |
| | | | | TFNKYAINWVRQAPGKGLEWVARIRSKYNNYATYYADAVKDRFTISR |
| | | | | DDSKNTVYLQMNNLKTEDTAVYYCARAGNFGSSYISYWAYWGQGTL |
| | | | | VTVSSGGGGQGGGGQGGGGQQTVVTQEPSLTVSPGGTVTITCGSSTGA |
| | | | | VTSGNYPNWVQKKPGQAPRGLIGGTKFLAPGTPARFSGSLSGGKAALT |
| | | | | LSGVQPEDEAEYYCVLWYSNRWVFGSGTKLTVL |
| 295. | CD20 82-A3 CC x | arti- | aa | EVQLVESGGGLVQPDRSLRLSCAASGFTFRDYAMHWVRQAPGKCLE |
| | CD22 76-H4 CC x | ficial | | WVSGIAWNSDSIGYADSVKGRFTISRDNAKNSLFLQMHSLRPEDTALY |
| | I2C x scFc | | | FCAKDTLYGSGSPRAFDIWGQGTMVTVSSGGGGSGGGGSGGGGSEIVL |
| | | | | TQSPATLSVSPGERATLSCRASQSVNNNLAWYQQKPGQAPRLLIYGAS |
| | | | | TRATGIPARFSGSGSGTEFTLTISRLEPEDFAVYYCQQSNNWPITFGCGT |
| | | | | RLEIKSGGGGSQVQLVQSGAEVKKPGASVKVSCKASGYTFNNYGISW |
| | | | | VRQAPGQCLEWMGWISAYNGKTSYAQKFQGRVTMTTDTSTGTAYME |
| | | | | LRSLRSDDTAVYYCARSTGDGEYWGQGTLVTVSSGGGGSGGGGSGG |
| | | | | GGSEIVMTQSPATLSVSPGERATLSCRASQSVSSNLAWYQQKPGQAPR |
| | | | | LLIYGASTRATGIPARFSGGGSGTEFTLTISSLQSEDFAVYYCQQYHTWP |
| | | | | VLTFGCGTKVEIKSGGGGSEVQLVESGGGLVQPGGSLKLSCAASGFTF |
| | | | | NKYAMNWVRQAPGKGLEWVARIRSKYNNYATYYADSVKDRFTISRD |
| | | | | DSKNTAYLQMNNLKTEDTAVYYCVRHGNFGNSYISYWAYWGQGTLV |
| | | | | TVSSGGGGSGGGGSGGGGSQTVVTQEPSLTVSPGGTVTLTCGSSTGAV |
| | | | | TSGNYPNWVQQKPGQAPRGLIGGTKFLAPGTPARFSGSLLGGKAALTL |
| | | | | SGVQPEDEAEYYCVLWYSNRWVFGGGTKLTVLGGGGDKTHTCPPCP |
| | | | | APELLGGPSVFLFPPKPKDTLMISRTPEVTCVVVDVSHEDPEVKFNWY |
| | | | | VDGVEVHNAKTKPCEEQYGSTYRCVSVLTVLHQDWLNGKEYKCKVS |
| | | | | NKALPAPIEKTISKAKGQPREPQVYTLPPSREEMTKNQVSLTCLVKGFY |
| | | | | PSDIAVEWESNGQPENNYKTTPPVLDSDGSFFLYSKLTVDKSRWQQGN |
| | | | | VFSCSVMHEALHNHYTQKSLSLSPGKGGGGSGGGGSGGGGSGGGGSG |
| | | | | GGGSGGGGSDKTHTCPPCPAPELLGGPSVFLFPPKPKDTLMISRTPEVT |
| | | | | CVVVDVSHEDPEVKFNWYVDGVEVHNAKTKPCEEQYGSTYRCVSVL |
| | | | | TVLHQDWLNGKEYKCKVSNKALPAPIEKTISKAKGQPREPQVYTLPPS |
| | | | | REEMTKNQVSLTCLVKGFYPSDIAVEWESNGQPENNYKTTPPVLDSDG |
| | | | | SFFLYSKLTVDKSRWQQGNVFSCSVMHEALHNHYTQKSLSLSPGK |
| 296. | CD20 82-A3 CC x | arti- | aa | EVQLVESGGGLVQPDRSLRLSCAASGFTFRDYAMHWVRQAPGKCLE |
| | CD22 76-H4 CC x | ficial | | WVSGIAWNSDSIGYADSVKGRFTISRDNAKNSLFLQMHSLRPEDTALY |
| | I2C x scFc | | | FCAKDTLYGSGSPRAFDIWGQGTMVTVSSGGGGQGGGGQGGGGQEIV |
| | clipopt | | | LTQSPATLSVSPGERATLSCRASQSVNNNLAWYQQKPGQAPRLLIYGA |
| | | | | STRATGIPARFSGSGSGTEFTLTISRLEPEDFAVYYCQQSNNWPITFGCG |
| | | | | TRLEIKSGGGGQQVQLVQSGAEVKKPGASVKVSCKASGYTENNYGIS |
| | | | | WVRQAPGQCLEWMGWISAYNGKTSYAQKFQGRVTMTTDTSTGTAY |
| | | | | MELRSLRSDDTAVYYCARSTGDGEYWGQGTLVTVSSGGGGQGGGGQ |
| | | | | GGGGQEIVMTQSPATLSVSPGERATLSCRASQSVSSNLAWYQQKPGQA |
| | | | | PRLLIYGASTRATGIPARFSGGGSGTEFTLTISSLQSEDFAVYYCQQYHT |
| | | | | WPVLTFGCGTKVEIKSGGGGQEVQLVESGGGLVQPGGSLKLSCAASGF |
| | | | | TFNKYAMNWVRQAPGKGLEWVARIRSKYNNYATYYADSVKDRFTIS |
| | | | | RDDSKNTAYLQMNNLKTEDTAVYYCVRHGNFGNSYISYWAYWGQGT |
| | | | | LVTVSSGGGGQGGGGQGGGGQQTVVTQEPSLTVSPGGTVTLTCGSST |
| | | | | GAVTSGNYPNWVQQKPGQAPRGLIGGTKFLAPGTPARFSGSLLGGKA |
| | | | | ALTLSGVQPEDEAEYYCVLWYSNRWVFGGGTKLTVLGGGGCPPCPAP |
| | | | | ELLGGPSVFLFPPKPKDTLMISRTPEVTCVVVDVSHEEPEVKFNWYVD |
| | | | | GVEVHNAKTKPCEEQYGSTYRCVSVLTVLHQDWLNGKEYKCKVSNK |
| | | | | ALPAPIEKTISKAKGQPREPQVYTLPPSREEMTKNQVSLTCLVKGFYPS |
| | | | | DIAVEWESNGQPENNYKTTPPVLDSDGSFFLYSKLTVDKSRWQQGNVF |
| | | | | SCSVMHEALHNHYTQKSLSLSPGKGGGGQGGGGQGGGGQGGGGQGG |
| | | | | GGQGGGGQCPPCPAPELLGGPSVFLFPPKPKDTLMISRTPEVTCVVVDV |
| | | | | SHEEPEVKFNWYVDGVEVHNAKTKPCEEQYGSTYRCVSVLTVLHQD |
| | | | | WLNGKEYKCKVSNKALPAPIEKTISKAKGQPREPQVYTLPPSREEMTK |
| | | | | NQVSLTCLVKGFYPSDIAVEWESNGQPENNYKTTPPVLDSDGSFFLYS |
| | | | | KLTVDKSRWQQGNVFSCSVMHEALHNHYTQKSLSLSPGK |
| 297. | CD20 82-A3 CC x | arti- | aa | EVQLVESGGGLVQPDRSLRLSCAASGFTFRDYAMHWVRQAPGKCLE |
| | CD22 76-H4 CC x | ficial | | WVSGIAWNSDSIGYADSVKGRFTISRDNAKNSLFLQMHSLRPEDTALY |
| | I2E x scFc | | | FCAKDTLYGSGSPRAFDIWGQGTMVTVSSGGGGSGGGGSGGGGSEIVL |
| | | | | TQSPATLSVSPGERATLSCRASQSVNNNLAWYQQKPGQAPRLLIYGAS |
| | | | | TRATGIPARFSGSGSGTEFTLTISRLEPEDFAVYYCQQSNNWPITFGCGT |
| | | | | RLEIKSGGGGSQVQLVQSGAEVKKPGASVKVSCKASGYTFNNYGISW |
| | | | | VRQAPGQCLEWMGWISAYNGKTSYAQKFQGRVTMTTDTSTGTAYME |
| | | | | LRSLRSDDTAVYYCARSTGDGEYWGQGTLVTVSSGGGGSGGGGSGG |
| | | | | GGSEIVMTQSPATLSVSPGERATLSCRASQSVSSNLAWYQQKPGQAPR |
| | | | | LLIYGASTRATGIPARFSGGGSGTEFTLTISSLQSEDFAVYYCQQYHTWP |
| | | | | VLTFGCGTKVEIKSGGGGSEVQLVESGGGLVQPGGSLKLSCAASGFTF |
| | | | | NKYAINWVRQAPGKGLEWVARIRSKYNNYATYYADAVKDRFTISRDD |
| | | | | SKNTVYLQMNNLKTEDTAVYYCARAGNFGSSYISYWAYWGQGTLVT |
| | | | | VSSGGGGSGGGGSGGGGSQTVVTQEPSLTVSPGGTVTITCGSSTGAVTS |
| | | | | GNYPNWVQKKPGQAPRGLIGGTKFLAPGTPARFSGSLSGGKAALTLSG |
| | | | | VQPEDEAEYYCVLWYSNRWVFGSGTKLTVLGGGGDKTHTCPPCPAPE |
| | | | | LLGGPSVFLFPPKPKDTLMISRTPEVTCVVVDVSHEDPEVKFNWYVDG |
| | | | | VEVHNAKTKPCEEQYGSTYRCVSVLTVLHQDWLNGKEYKCKVSNKA |
| | | | | LPAPIEKTISKAKGQPREPQVYTLPPSREEMTKNQVSLTCLVKGFYPSDI |
| | | | | AVEWESNGQPENNYKTTPPVLDSDGSFFLYSKLTVDKSRWQQGNVFS |
| | | | | CSVMHEALHNHYTQKSLSLSPGKGGGGSGGGGSGGGGSGGGGSGGG |
| | | | | GSGGGGSDKTHTCPPCPAPELLGGPSVFLFPPKPKDTLMISRTPEVTCV |
| | | | | VVDVSHEDPEVKFNWYVDGVEVHNAKTKPCEEQYGSTYRCVSVLTV |
| | | | | LHQDWLNGKEYKCKVSNKALPAPIEKTISKAKGQPREPQVYTLPPSRE |
| | | | | EMTKNQVSLTCLVKGFYPSDIAVEWESNGQPENNYKTTPPVLDSDGSF |
| | | | | FLYSKLTVDKSRWQQGNVFSCSVMHEALHNHYTQKSLSLSPGK |
| 298. | CD20 82-A3 CC x | arti- | aa | EVQLVESGGGLVQPDRSLRLSCAASGFTFRDYAMHWVRQAPGKCLE |
| | CD22 76-H4 CC x | ficial | | WVSGIAWNSDSIGYADSVKGRFTISRDNAKNSLFLQMHSLRPEDTALY |
| | I2E x scFc | | | FCAKDTLYGSGSPRAFDIWGQGTMVTVSSGGGGQGGGGQGGGGQEIV |
| | clipopt | | | LTQSPATLSVSPGERATLSCRASQSVNNNLAWYQQKPGQAPRLLIYGA |
| | | | | STRATGIPARFSGSGSGTEFTLTISRLEPEDFAVYYCQQSNNWPITFGCG |
| | | | | TRLEIKSGGGGQQVQLVQSGAEVKKPGASVKVSCKASGYTENNYGIS |
| | | | | WVRQAPGQCLEWMGWISAYNGKTSYAQKFQGRVTMTTDTSTGTAY |
| | | | | MELRSLRSDDTAVYYCARSTGDGEYWGQGTLVTVSSGGGGQGGGGQ |
| | | | | GGGGQEIVMTQSPATLSVSPGERATLSCRASQSVSSNLAWYQQKPGQA |
| | | | | PRLLIYGASTRATGIPARFSGGGSGTEFTLTISSLQSEDFAVYYCQQYHT |
| | | | | WPVLTFGCGTKVEIKSGGGGQEVQLVESGGGLVQPGGSLKLSCAASGF |
| | | | | TFNKYAINWVRQAPGKGLEWVARIRSKYNNYATYYADAVKDRFTISR |
| | | | | DDSKNTVYLQMNNLKTEDTAVYYCARAGNFGSSYISYWAYWGQGTL |
| | | | | VTVSSGGGGQGGGGQGGGGQQTVVTQEPSLTVSPGGTVTITCGSSTGA |
| | | | | VTSGNYPNWVQKKPGQAPRGLIGGTKFLAPGTPARFSGSLSGGKAALT |
| | | | | LSGVQPEDEAEYYCVLWYSNRWVFGSGTKLTVLGGGGCPPCPAPELL |
| | | | | GGPSVFLFPPKPKDTLMISRTPEVTCVVVDVSHEEPEVKFNWYVDGVE |
| | | | | VHNAKTKPCEEQYGSTYRCVSVLTVLHQDWLNGKEYKCKVSNKALP |
| | | | | APIEKTISKAKGQPREPQVYTLPPSREEMTKNQVSLTCLVKGFYPSDIA |
| | | | | VEWESNGQPENNYKTTPPVLDSDGSFFLYSKLTVDKSRWQQGNVFSCS |
| | | | | VMHEALHNHYTQKSLSLSPGKGGGGQGGGGQGGGGQGGGGQGGGG |
| | | | | QGGGGQCPPCPAPELLGGPSVFLFPPKPKDTLMISRTPEVTCVVVDVSH |
| | | | | EEPEVKFNWYVDGVEVHNAKTKPCEEQYGSTYRCVSVLTVLHQDWL |
| | | | | NGKEYKCKVSNKALPAPIEKTISKAKGQPREPQVYTLPPSREEMTKNQ |
| | | | | VSLTCLVKGFYPSDIAVEWESNGQPENNYKTTPPVLDSDGSFFLYSKLT |
| | | | | VDKSRWQQGNVFSCSVMHEALHNHYTQKSLSLSPGK |
| 299. | CD20 82-A3 CC x | arti- | aa | EVQLVESGGGLVQPDRSLRLSCAASGFTFRDYAMHWVRQAPGKCLE |
| | CD22 97K-A8 CC | ficial | | WVSGIAWNSDSIGYADSVKGRFTISRDNAKNSLFLQMHSLRPEDTALY |
| | | | | FCAKDTLYGSGSPRAFDIWGQGTMVTVSSGGGGSGGGGSGGGGSEIVL |
| | | | | TQSPATLSVSPGERATLSCRASQSVNNNLAWYQQKPGQAPRLLIYGAS |
| | | | | TRATGIPARFSGSGSGTEFTLTISRLEPEDFAVYYCQQSNNWPITFGCGT |
| | | | | RLEIKSGGGGSQLQLQESGPGLVKPSETLSLTCFVSGGSISNSDYFWGW |
| | | | | IRQPPGKCLEWIGTIYYSGRTYYNPSLKSRVTISVDTSKNQFSLMLSSVT |
| | | | | AVDTAVYYCARYQYGSFDYWGQGTLVTVSSGGGGSGGGGSGGGGSD |
| | | | | IVMTQTPLSLPVTPGEPASISCRSSQSLLHSNGYNYLDWYLQKPGQSPQ |
| | | | | LLIYLGSNRASGVPDRFSGSGSGTDFTLKISRVEAEDVGVYYCMQALQ |
| | | | | TPYTFGCGTKVEIR |
| 300. | CD20 82-A3 CC x | arti- | aa | EVQLVESGGGLVQPDRSLRLSCAASGFTFRDYAMHWVRQAPGKCLE |
| | CD22 97K-A8 CC | ficial | | WVSGIAWNSDSIGYADSVKGRFTISRDNAKNSLFLQMHSLRPEDTALY |
| | clipopt | | | FCAKDTLYGSGSPRAFDIWGQGTMVTVSSGGGGQGGGGQGGGGQEIV |
| | | | | LTQSPATLSVSPGERATLSCRASQSVNNNLAWYQQKPGQAPRLLIYGA |
| | | | | STRATGIPARFSGSGSGTEFTLTISRLEPEDFAVYYCQQSNNWPITFGCG |
| | | | | TRLEIKSGGGGQQLQLQESGPGLVKPSETLSLTCFVSGGSISNSDYFWG |
| | | | | WIRQPPGKCLEWIGTIYYSGRTYYNPSLKSRVTISVDTSKNQFSLMLSS |
| | | | | VTAVDTAVYYCARYQYGSFDYWGQGTLVTVSSGGGGQGGGGQGGG |
| | | | | GQEIVMTQTPLSLPVTPGEPASISCRSSQSLLHSNGYNYLDWYLQKPGQ |
| | | | | SPQLLIYLGSNRASGVPDRFSGSGSGTDFTLKISRVEAEDVGVYYCMQA |
| | | | | LQTPYTFGCGTKVEIR |
| 301. | CD20 82-A3 CC x | arti- | aa | EVQLVESGGGLVQPDRSLRLSCAASGFTFRDYAMHWVRQAPGKCLE |
| | CD22 97K-A8 CC | ficial | | WVSGIAWNSDSIGYADSVKGRFTISRDNAKNSLFLQMHSLRPEDTALY |
| | x I2C | | | FCAKDTLYGSGSPRAFDIWGQGTMVTVSSGGGGSGGGGSGGGGSEIVL |
| | | | | TQSPATLSVSPGERATLSCRASQSVNNNLAWYQQKPGQAPRLLIYGAS |
| | | | | TRATGIPARFSGSGSGTEFTLTISRLEPEDFAVYYCQQSNNWPITFGCGT |
| | | | | RLEIKSGGGGSQLQLQESGPGLVKPSETLSLTCFVSGGSISNSDYFWGW |
| | | | | IRQPPGKCLEWIGTIYYSGRTYYNPSLKSRVTISVDTSKNQFSLMLSSVT |
| | | | | AVDTAVYYCARYQYGSFDYWGQGTLVTVSSGGGGSGGGGSGGGGSD |
| | | | | IVMTQTPLSLPVTPGEPASISCRSSQSLLHSNGYNYLDWYLQKPGQSPQ |
| | | | | LLIYLGSNRASGVPDRFSGSGSGTDFTLKISRVEAEDVGVYYCMQALQ |
| | | | | TPYTFGCGTKVEIRSGGGGSEVQLVESGGGLVQPGGSLKLSCAASGFTF |
| | | | | NKYAMNWVRQAPGKGLEWVARIRSKYNNYATYYADSVKDRFTISRD |
| | | | | DSKNTAYLQMNNLKTEDTAVYYCVRHGNFGNSYISYWAYWGQGTLV |
| | | | | TVSSGGGGSGGGGSGGGGSQTVVTQEPSLTVSPGGTVTLTCGSSTGAV |
| | | | | TSGNYPNWVQQKPGQAPRGLIGGTKFLAPGTPARFSGSLLGGKAALTL |
| | | | | SGVQPEDEAEYYCVLWYSNRWVFGGGTKLTVL |
| 302. | CD20 82-A3 CC x | arti- | aa | EVQLVESGGGLVQPDRSLRLSCAASGFTFRDYAMHWVRQAPGKCLE |
| | CD22 97K-A8 CC | ficial | | WVSGIAWNSDSIGYADSVKGRFTISRDNAKNSLFLQMHSLRPEDTALY |
| | x I2C clipopt | | | FCAKDTLYGSGSPRAFDIWGQGTMVTVSSGGGGQGGGGQGGGGQEIV |
| | | | | LTQSPATLSVSPGERATLSCRASQSVNNNLAWYQQKPGQAPRLLIYGA |
| | | | | STRATGIPARFSGSGSGTEFTLTISRLEPEDFAVYYCQQSNNWPITFGCG |
| | | | | TRLEIKSGGGGQQLQLQESGPGLVKPSETLSLTCFVSGGSISNSDYFWG |
| | | | | WIRQPPGKCLEWIGTIYYSGRTYYNPSLKSRVTISVDTSKNQFSLMLSS |
| | | | | VTAVDTAVYYCARYQYGSFDYWGQGTLVTVSSGGGGQGGGGQGGG |
| | | | | GQEIVMTQTPLSLPVTPGEPASISCRSSQSLLHSNGYNYLDWYLQKPGQ |
| | | | | SPQLLIYLGSNRASGVPDRFSGSGSGTDFTLKISRVEAEDVGVYYCMQA |
| | | | | LQTPYTFGCGTKVEIRSGGGGQEVQLVESGGGLVQPGGSLKLSCAASG |
| | | | | FTFNKYAMNWVRQAPGKGLEWVARIRSKYNNYATYYADSVKDRFTIS |
| | | | | RDDSKNTAYLQMNNLKTEDTAVYYCVRHGNFGNSYISYWAYWGQGT |
| | | | | LVTVSSGGGGQGGGGQGGGGQQTVVTQEPSLTVSPGGTVTLTCGSST |
| | | | | GAVTSGNYPNWVQQKPGQAPRGLIGGTKFLAPGTPARFSGSLLGGKA |
| | | | | ALTLSGVQPEDEAEYYCVLWYSNRWVFGGGTKLTVL |
| 303. | CD20 82-A3 CC x | arti- | aa | EVQLVESGGGLVQPDRSLRLSCAASGFTFRDYAMHWVRQAPGKCLE |
| | CD22 97K-A8 CC | ficial | | WVSGIAWNSDSIGYADSVKGRFTISRDNAKNSLFLQMHSLRPEDTALY |
| | x I2E | | | FCAKDTLYGSGSPRAFDIWGQGTMVTVSSGGGGSGGGGSGGGGSEIVL |
| | | | | TQSPATLSVSPGERATLSCRASQSVNNNLAWYQQKPGQAPRLLIYGAS |
| | | | | TRATGIPARFSGSGSGTEFTLTISRLEPEDFAVYYCQQSNNWPITFGCGT |
| | | | | RLEIKSGGGGSQLQLQESGPGLVKPSETLSLTCFVSGGSISNSDYFWGW |
| | | | | IRQPPGKCLEWIGTIYYSGRTYYNPSLKSRVTISVDTSKNQFSLMLSSVT |
| | | | | AVDTAVYYCARYQYGSFDYWGQGTLVTVSSGGGGSGGGGSGGGGSD |
| | | | | IVMTQTPLSLPVTPGEPASISCRSSQSLLHSNGYNYLDWYLQKPGQSPQ |
| | | | | LLIYLGSNRASGVPDRFSGSGSGTDFTLKISRVEAEDVGVYYCMQALQ |
| | | | | TPYTFGCGTKVEIRSGGGGSEVQLVESGGGLVQPGGSLKLSCAASGFTF |
| | | | | NKYAINWVRQAPGKGLEWVARIRSKYNNYATYYADAVKDRFTISRDD |
| | | | | SKNTVYLQMNNLKTEDTAVYYCARAGNFGSSYISYWAYWGQGTLVT |
| | | | | VSSGGGGSGGGGSGGGGSQTVVTQEPSLTVSPGGTVTITCGSSTGAVTS |
| | | | | GNYPNWVQKKPGQAPRGLIGGTKFLAPGTPARFSGSLSGGKAALTLSG |
| | | | | VQPEDEAEYYCVLWYSNRWVFGSGTKLTVL |
| 304. | CD20 82-A3 CC x | arti- | aa | EVQLVESGGGLVQPDRSLRLSCAASGFTFRDYAMHWVRQAPGKCLE |
| | CD22 97K-A8 CC | ficial | | WVSGIAWNSDSIGYADSVKGRFTISRDNAKNSLFLQMHSLRPEDTALY |
| | x I2E clipopt | | | FCAKDTLYGSGSPRAFDIWGQGTMVTVSSGGGGQGGGGQGGGGQEIV |
| | | | | LTQSPATLSVSPGERATLSCRASQSVNNNLAWYQQKPGQAPRLLIYGA |
| | | | | STRATGIPARFSGSGSGTEFTLTISRLEPEDFAVYYCQQSNNWPITFGCG |
| | | | | TRLEIKSGGGGQQLQLQESGPGLVKPSETLSLTCFVSGGSISNSDYFWG |
| | | | | WIRQPPGKCLEWIGTIYYSGRTYYNPSLKSRVTISVDTSKNQFSLMLSS |
| | | | | VTAVDTAVYYCARYQYGSFDYWGQGTLVTVSSGGGGQGGGGQGGG |
| | | | | GQEIVMTQTPLSLPVTPGEPASISCRSSQSLLHSNGYNYLDWYLQKPGQ |
| | | | | SPQLLIYLGSNRASGVPDRFSGSGSGTDFTLKISRVEAEDVGVYYCMQA |
| | | | | LQTPYTFGCGTKVEIRSGGGGQEVQLVESGGGLVQPGGSLKLSCAASG |
| | | | | FTFNKYAINWVRQAPGKGLEWVARIRSKYNNYATYYADAVKDRFTIS |
| | | | | RDDSKNTVYLQMNNLKTEDTAVYYCARAGNFGSSYISYWAYWGQGT |
| | | | | LVTVSSGGGGQGGGGQGGGGQQTVVTQEPSLTVSPGGTVTITCGSSTG |
| | | | | AVTSGNYPNWVQKKPGQAPRGLIGGTKFLAPGTPARFSGSLSGGKAAL |
| | | | | TLSGVQPEDEAEYYCVLWYSNRWVFGSGTKLTVL |
| 305. | CD20 82-A3 CC x | arti- | aa | EVQLVESGGGLVQPDRSLRLSCAASGFTFRDYAMHWVRQAPGKCLE |
| | CD22 97K-A8 CC | ficial | | WVSGIAWNSDSIGYADSVKGRFTISRDNAKNSLFLQMHSLRPEDTALY |
| | x I2C x scFc | | | FCAKDTLYGSGSPRAFDIWGQGTMVTVSSGGGGSGGGGSGGGGSEIVL |
| | | | | TQSPATLSVSPGERATLSCRASQSVNNNLAWYQQKPGQAPRLLIYGAS |
| | | | | TRATGIPARFSGSGSGTEFTLTISRLEPEDFAVYYCQQSNNWPITFGCGT |
| | | | | RLEIKSGGGGSQLQLQESGPGLVKPSETLSLTCFVSGGSISNSDYFWGW |
| | | | | IRQPPGKCLEWIGTIYYSGRTYYNPSLKSRVTISVDTSKNQFSLMLSSVT |
| | | | | AVDTAVYYCARYQYGSFDYWGQGTLVTVSSGGGGSGGGGSGGGGSD |
| | | | | IVMTQTPLSLPVTPGEPASISCRSSQSLLHSNGYNYLDWYLQKPGQSPQ |
| | | | | LLIYLGSNRASGVPDRFSGSGSGTDFTLKISRVEAEDVGVYYCMQALQ |
| | | | | TPYTFGCGTKVEIRSGGGGSEVQLVESGGGLVQPGGSLKLSCAASGFTF |
| | | | | NKYAMNWVRQAPGKGLEWVARIRSKYNNYATYYADSVKDRFTISRD |
| | | | | DSKNTAYLQMNNLKTEDTAVYYCVRHGNFGNSYISYWAYWGQGTLV |
| | | | | TVSSGGGGSGGGGSGGGGSQTVVTQEPSLTVSPGGTVTLTCGSSTGAV |
| | | | | TSGNYPNWVQQKPGQAPRGLIGGTKFLAPGTPARFSGSLLGGKAALTL |
| | | | | SGVQPEDEAEYYCVLWYSNRWVFGGGTKLTVLGGGGDKTHTCPPCP |
| | | | | APELLGGPSVFLFPPKPKDTLMISRTPEVTCVVVDVSHEDPEVKFNWY |
| | | | | VDGVEVHNAKTKPCEEQYGSTYRCVSVLTVLHQDWLNGKEYKCKVS |
| | | | | NKALPAPIEKTISKAKGQPREPQVYTLPPSREEMTKNQVSLTCLVKGFY |
| | | | | PSDIAVEWESNGQPENNYKTTPPVLDSDGSFFLYSKLTVDKSRWQQGN |
| | | | | VFSCSVMHEALHNHYTQKSLSLSPGKGGGGSGGGGSGGGGSGGGGSG |
| | | | | GGGSGGGGSDKTHTCPPCPAPELLGGPSVFLFPPKPKDTLMISRTPEVT |
| | | | | CVVVDVSHEDPEVKFNWYVDGVEVHNAKTKPCEEQYGSTYRCVSVL |
| | | | | TVLHQDWLNGKEYKCKVSNKALPAPIEKTISKAKGQPREPQVYTLPPS |
| | | | | REEMTKNQVSLTCLVKGFYPSDIAVEWESNGQPENNYKTTPPVLDSDG |
| | | | | SFFLYSKLTVDKSRWQQGNVFSCSVMHEALHNHYTQKSLSLSPGK |
| 306. | CD20 82-A3 CC x | arti- | aa | EVQLVESGGGLVQPDRSLRLSCAASGFTFRDYAMHWVRQAPGKCLE |
| | CD22 97K-A8 CC | ficial | | WVSGIAWNSDSIGYADSVKGRFTISRDNAKNSLFLQMHSLRPEDTALY |
| | x I2C x scFc | | | FCAKDTLYGSGSPRAFDIWGQGTMVTVSSGGGGQGGGGQGGGGQEIV |
| | clipopt | | | LTQSPATLSVSPGERATLSCRASQSVNNNLAWYQQKPGQAPRLLIYGA |
| | | | | STRATGIPARFSGSGSGTEFTLTISRLEPEDFAVYYCQQSNNWPITFGCG |
| | | | | TRLEIKSGGGGQQLQLQESGPGLVKPSETLSLTCFVSGGSISNSDYFWG |
| | | | | WIRQPPGKCLEWIGTIYYSGRTYYNPSLKSRVTISVDTSKNQFSLMLSS |
| | | | | VTAVDTAVYYCARYQYGSFDYWGQGTLVTVSSGGGGQGGGGQGGG |
| | | | | GQEIVMTQTPLSLPVTPGEPASISCRSSQSLLHSNGYNYLDWYLQKPGQ |
| | | | | SPQLLIYLGSNRASGVPDRFSGSGSGTDFTLKISRVEAEDVGVYYCMQA |
| | | | | LQTPYTFGCGTKVEIRSGGGGQEVQLVESGGGLVQPGGSLKLSCAASG |
| | | | | FTFNKYAMNWVRQAPGKGLEWVARIRSKYNNYATYYADSVKDRFTIS |
| | | | | RDDSKNTAYLQMNNLKTEDTAVYYCVRHGNFGNSYISYWAYWGQGT |
| | | | | LVTVSSGGGGQGGGGQGGGGQQTVVTQEPSLTVSPGGTVTLTCGSST |
| | | | | GAVTSGNYPNWVQQKPGQAPRGLIGGTKFLAPGTPARFSGSLLGGKA |
| | | | | ALTLSGVQPEDEAEYYCVLWYSNRWVFGGGTKLTVLGGGGCPPCPAP |
| | | | | ELLGGPSVFLFPPKPKDTLMISRTPEVTCVVVDVSHEEPEVKFNWYVD |
| | | | | GVEVHNAKTKPCEEQYGSTYRCVSVLTVLHQDWLNGKEYKCKVSNK |
| | | | | ALPAPIEKTISKAKGQPREPQVYTLPPSREEMTKNQVSLTCLVKGFYPS |
| | | | | DIAVEWESNGQPENNYKTTPPVLDSDGSFFLYSKLTVDKSRWQQGNVF |
| | | | | SCSVMHEALHNHYTQKSLSLSPGKGGGGQGGGGQGGGGQGGGGQGG |
| | | | | GGQGGGGQCPPCPAPELLGGPSVFLFPPKPKDTLMISRTPEVTCVVVDV |
| | | | | SHEEPEVKFNWYVDGVEVHNAKTKPCEEQYGSTYRCVSVLTVLHQD |
| | | | | WLNGKEYKCKVSNKALPAPIEKTISKAKGQPREPQVYTLPPSREEMTK |
| | | | | NQVSLTCLVKGFYPSDIAVEWESNGQPENNYKTTPPVLDSDGSFFLYS |
| | | | | KLTVDKSRWQQGNVFSCSVMHEALHNHYTQKSLSLSPGK |
| 307. | CD20 82-A3 CC x | arti- | aa | EVQLVESGGGLVQPDRSLRLSCAASGFTFRDYAMHWVRQAPGKCLE |
| | CD22 97K-A8 CC | ficial | | WVSGIAWNSDSIGYADSVKGRFTISRDNAKNSLFLQMHSLRPEDTALY |
| | x I2E x scFc | | | FCAKDTLYGSGSPRAFDIWGQGTMVTVSSGGGGSGGGGSGGGGSEIVL |
| | | | | TQSPATLSVSPGERATLSCRASQSVNNNLAWYQQKPGQAPRLLIYGAS |
| | | | | TRATGIPARFSGSGSGTEFTLTISRLEPEDFAVYYCQQSNNWPITFGCGT |
| | | | | RLEIKSGGGGSQLQLQESGPGLVKPSETLSLTCFVSGGSISNSDYFWGW |
| | | | | IRQPPGKCLEWIGTIYYSGRTYYNPSLKSRVTISVDTSKNQFSLMLSSVT |
| | | | | AVDTAVYYCARYQYGSFDYWGQGTLVTVSSGGGGSGGGGSGGGGSD |
| | | | | IVMTQTPLSLPVTPGEPASISCRSSQSLLHSNGYNYLDWYLQKPGQSPQ |
| | | | | LLIYLGSNRASGVPDRFSGSGSGTDFTLKISRVEAEDVGVYYCMQALQ |
| | | | | TPYTFGCGTKVEIRSGGGGSEVQLVESGGGLVQPGGSLKLSCAASGFTF |
| | | | | NKYAINWVRQAPGKGLEWVARIRSKYNNYATYYADAVKDRFTISRDD |
| | | | | SKNTVYLQMNNLKTEDTAVYYCARAGNFGSSYISYWAYWGQGTLVT |
| | | | | VSSGGGGSGGGGSGGGGSQTVVTQEPSLTVSPGGTVTITCGSSTGAVTS |
| | | | | GNYPNWVQKKPGQAPRGLIGGTKFLAPGTPARFSGSLSGGKAALTLSG |
| | | | | VQPEDEAEYYCVLWYSNRWVFGSGTKLTVLGGGGDKTHTCPPCPAPE |
| | | | | LLGGPSVFLFPPKPKDTLMISRTPEVTCVVVDVSHEDPEVKFNWYVDG |
| | | | | VEVHNAKTKPCEEQYGSTYRCVSVLTVLHQDWLNGKEYKCKVSNKA |
| | | | | LPAPIEKTISKAKGQPREPQVYTLPPSREEMTKNQVSLTCLVKGFYPSDI |
| | | | | AVEWESNGQPENNYKTTPPVLDSDGSFFLYSKLTVDKSRWQQGNVFS |
| | | | | CSVMHEALHNHYTQKSLSLSPGKGGGGSGGGGSGGGGSGGGGSGGG |
| | | | | GSGGGGSDKTHTCPPCPAPELLGGPSVFLFPPKPKDTLMISRTPEVTCV |
| | | | | VVDVSHEDPEVKFNWYVDGVEVHNAKTKPCEEQYGSTYRCVSVLTV |
| | | | | LHQDWLNGKEYKCKVSNKALPAPIEKTISKAKGQPREPQVYTLPPSRE |
| | | | | EMTKNQVSLTCLVKGFYPSDIAVEWESNGQPENNYKTTPPVLDSDGSF |
| | | | | FLYSKLTVDKSRWQQGNVFSCSVMHEALHNHYTQKSLSLSPGK |
| 308. | CD20 82-A3 CC x | arti- | aa | EVQLVESGGGLVQPDRSLRLSCAASGFTFRDYAMHWVRQAPGKCLE |
| | CD22 97K-A8 CC | ficial | | WVSGIAWNSDSIGYADSVKGRFTISRDNAKNSLFLQMHSLRPEDTALY |
| | x I2E x scFc | | | FCAKDTLYGSGSPRAFDIWGQGTMVTVSSGGGGQGGGGQGGGGQEIV |
| | clipopt | | | LTQSPATLSVSPGERATLSCRASQSVNNNLAWYQQKPGQAPRLLIYGA |
| | | | | STRATGIPARFSGSGSGTEFTLTISRLEPEDFAVYYCQQSNNWPITFGCG |
| | | | | TRLEIKSGGGGQQLQLQESGPGLVKPSETLSLTCFVSGGSISNSDYFWG |
| | | | | WIRQPPGKCLEWIGTIYYSGRTYYNPSLKSRVTISVDTSKNQFSLMLSS |
| | | | | VTAVDTAVYYCARYQYGSFDYWGQGTLVTVSSGGGGQGGGGQGGG |
| | | | | GQEIVMTQTPLSLPVTPGEPASISCRSSQSLLHSNGYNYLDWYLQKPGQ |
| | | | | SPQLLIYLGSNRASGVPDRFSGSGSGTDFTLKISRVEAEDVGVYYCMQA |
| | | | | LQTPYTFGCGTKVEIRSGGGGQEVQLVESGGGLVQPGGSLKLSCAASG |
| | | | | FTFNKYAINWVRQAPGKGLEWVARIRSKYNNYATYYADAVKDRFTIS |
| | | | | RDDSKNTVYLQMNNLKTEDTAVYYCARAGNFGSSYISYWAYWGQGT |
| | | | | LVTVSSGGGGQGGGGQGGGGQQTVVTQEPSLTVSPGGTVTITCGSSTG |
| | | | | AVTSGNYPNWVQKKPGQAPRGLIGGTKFLAPGTPARFSGSLSGGKAAL |
| | | | | TLSGVQPEDEAEYYCVLWYSNRWVFGSGTKLTVLGGGGCPPCPAPEL |
| | | | | LGGPSVFLFPPKPKDTLMISRTPEVTCVVVDVSHEEPEVKFNWYVDGV |
| | | | | EVHNAKTKPCEEQYGSTYRCVSVLTVLHQDWLNGKEYKCKVSNKAL |
| | | | | PAPIEKTISKAKGQPREPQVYTLPPSREEMTKNQVSLTCLVKGFYPSDIA |
| | | | | VEWESNGQPENNYKTTPPVLDSDGSFFLYSKLTVDKSRWQQGNVFSCS |
| | | | | VMHEALHNHYTQKSLSLSPGKGGGGQGGGGQGGGGQGGGGQGGGG |
| | | | | QGGGGQCPPCPAPELLGGPSVFLFPPKPKDTLMISRTPEVTCVVVDVSH |
| | | | | EEPEVKFNWYVDGVEVHNAKTKPCEEQYGSTYRCVSVLTVLHQDWL |
| | | | | NGKEYKCKVSNKALPAPIEKTISKAKGQPREPQVYTLPPSREEMTKNQ |
| | | | | VSLTCLVKGFYPSDIAVEWESNGQPENNYKTTPPVLDSDGSFFLYSKLT |
| | | | | VDKSRWQQGNVFSCSVMHEALHNHYTQKSLSLSPGK |
| 309. | CD20 82-A3 CC x | arti- | aa | EVQLVESGGGLVQPDRSLRLSCAASGFTFRDYAMHWVRQAPGKCLE |
| | CD22 99-F10 CC | ficial | | WVSGIAWNSDSIGYADSVKGRFTISRDNAKNSLFLQMHSLRPEDTALY |
| | | | | FCAKDTLYGSGSPRAFDIWGQGTMVTVSSGGGGSGGGGSGGGGSEIVL |
| | | | | TQSPATLSVSPGERATLSCRASQSVNNNLAWYQQKPGQAPRLLIYGAS |
| | | | | TRATGIPARFSGSGSGTEFTLTISRLEPEDFAVYYCQQSNNWPITFGCGT |
| | | | | RLEIKSGGGGSQVQLVESGGGVVQPGRSLRLSCAASGFTFSAYGMHW |
| | | | | VRQAPGKCLEWVAVILYDGSNKYYADSVKGRFTISRDNSKNTLYLQM |
| | | | | NSLRAEDTAVYYCARGSGWLQLGDYFDYWGQGTLVTVSSGGGGSGG |
| | | | | GGSGGGGSQSALTQPPSVSGSPGQSITISCTGTSSDVGGYNYVSWYQQ |
| | | | | HPGKAPKLMIYEVSNRPSGVSNRFSGSKSGNTASLTISGLQAEDEADYY |
| | | | | CSSYTSSSTLVFGCGTKLTVL |
| 310. | CD20 82-A3 CC x | arti- | aa | EVQLVESGGGLVQPDRSLRLSCAASGFTFRDYAMHWVRQAPGKCLE |
| | CD22 99-F10 CC | ficial | | WVSGIAWNSDSIGYADSVKGRFTISRDNAKNSLFLQMHSLRPEDTALY |
| | clipopt | | | FCAKDTLYGSGSPRAFDIWGQGTMVTVSSGGGGQGGGGQGGGGQEIV |
| | | | | LTQSPATLSVSPGERATLSCRASQSVNNNLAWYQQKPGQAPRLLIYGA |
| | | | | STRATGIPARFSGSGSGTEFTLTISRLEPEDFAVYYCQQSNNWPITFGCG |
| | | | | TRLEIKSGGGGQQVQLVESGGGVVQPGRSLRLSCAASGFTFSAYGMH |
| | | | | WVRQAPGKCLEWVAVILYDGSNKYYADSVKGRFTISRDNSKNTLYLQ |
| | | | | MNSLRAEDTAVYYCARGSGWLQLGDYFDYWGQGTLVTVSSGGGGQ |
| | | | | GGGGQGGGGQQSALTQPPSVSGSPGQSITISCTGTSSDVGGYNYVSWY |
| | | | | QQHPGKAPKLMIYEVSNRPSGVSNRFSGSKSGNTASLTISGLQAEDEAD |
| | | | | YYCSSYTSSSTLVFGCGTKLTVL |
| 311. | CD20 82-A3 CC x | arti- | aa | EVQLVESGGGLVQPDRSLRLSCAASGFTFRDYAMHWVRQAPGKCLE |
| | CD22 99-F10 CC | ficial | | WVSGIAWNSDSIGYADSVKGRFTISRDNAKNSLFLQMHSLRPEDTALY |
| | x I2C | | | FCAKDTLYGSGSPRAFDIWGQGTMVTVSSGGGGSGGGGSGGGGSEIVL |
| | | | | TQSPATLSVSPGERATLSCRASQSVNNNLAWYQQKPGQAPRLLIYGAS |
| | | | | TRATGIPARFSGSGSGTEFTLTISRLEPEDFAVYYCQQSNNWPITFGCGT |
| | | | | RLEIKSGGGGSQVQLVESGGGVVQPGRSLRLSCAASGFTFSAYGMHW |
| | | | | VRQAPGKCLEWVAVILYDGSNKYYADSVKGRFTISRDNSKNTLYLQM |
| | | | | NSLRAEDTAVYYCARGSGWLQLGDYFDYWGQGTLVTVSSGGGGSGG |
| | | | | GGSGGGGSQSALTQPPSVSGSPGQSITISCTGTSSDVGGYNYVSWYQQ |
| | | | | HPGKAPKLMIYEVSNRPSGVSNRFSGSKSGNTASLTISGLQAEDEADYY |
| | | | | CSSYTSSSTLVFGCGTKLTVLSGGGGSEVQLVESGGGLVQPGGSLKLSC |
| | | | | AASGFTFNKYAMNWVRQAPGKGLEWVARIRSKYNNYATYYADSVKD |
| | | | | RFTISRDDSKNTAYLQMNNLKTEDTAVYYCVRHGNFGNSYISYWAYW |
| | | | | GQGTLVTVSSGGGGSGGGGSGGGGSQTVVTQEPSLTVSPGGTVTLTCG |
| | | | | SSTGAVTSGNYPNWVQQKPGQAPRGLIGGTKFLAPGTPARFSGSLLGG |
| | | | | KAALTLSGVQPEDEAEYYCVLWYSNRWVFGGGTKLTVL |
| 312. | CD20 82-A3 CC x | arti- | aa | EVQLVESGGGLVQPDRSLRLSCAASGFTFRDYAMHWVRQAPGKCLE |
| | CD22 99-F10 CC | ficial | | WVSGIAWNSDSIGYADSVKGRFTISRDNAKNSLFLQMHSLRPEDTALY |
| | x I2C clipopt | | | FCAKDTLYGSGSPRAFDIWGQGTMVTVSSGGGGQGGGGQGGGGQEIV |
| | | | | LTQSPATLSVSPGERATLSCRASQSVNNNLAWYQQKPGQAPRLLIYGA |
| | | | | STRATGIPARFSGSGSGTEFTLTISRLEPEDFAVYYCQQSNNWPITFGCG |
| | | | | TRLEIKSGGGGQQVQLVESGGGVVQPGRSLRLSCAASGFTFSAYGMH |
| | | | | WVRQAPGKCLEWVAVILYDGSNKYYADSVKGRFTISRDNSKNTLYLQ |
| | | | | MNSLRAEDTAVYYCARGSGWLQLGDYFDYWGQGTLVTVSSGGGGQ |
| | | | | GGGGQGGGGQQSALTQPPSVSGSPGQSITISCTGTSSDVGGYNYVSWY |
| | | | | QQHPGKAPKLMIYEVSNRPSGVSNRFSGSKSGNTASLTISGLQAEDEAD |
| | | | | YYCSSYTSSSTLVFGCGTKLTVLSGGGGQEVQLVESGGGLVQPGGSLK |
| | | | | LSCAASGFTFNKYAMNWVRQAPGKGLEWVARIRSKYNNYATYYADS |
| | | | | VKDRFTISRDDSKNTAYLQMNNLKTEDTAVYYCVRHGNFGNSYISYW |
| | | | | AYWGQGTLVTVSSGGGGQGGGGQGGGGQQTVVTQEPSLTVSPGGTV |
| | | | | TLTCGSSTGAVTSGNYPNWVQQKPGQAPRGLIGGTKFLAPGTPARFSG |
| | | | | SLLGGKAALTLSGVQPEDEAEYYCVLWYSNRWVFGGGTKLTVL |
| 313. | CD20 82-A3 CC x | arti- | aa | EVQLVESGGGLVQPDRSLRLSCAASGFTFRDYAMHWVRQAPGKCLE |
| | CD22 99-F10 CC | ficial | | WVSGIAWNSDSIGYADSVKGRFTISRDNAKNSLFLQMHSLRPEDTALY |
| | x I2E | | | FCAKDTLYGSGSPRAFDIWGQGTMVTVSSGGGGSGGGGSGGGGSEIVL |
| | | | | TQSPATLSVSPGERATLSCRASQSVNNNLAWYQQKPGQAPRLLIYGAS |
| | | | | TRATGIPARFSGSGSGTEFTLTISRLEPEDFAVYYCQQSNNWPITFGCGT |
| | | | | RLEIKSGGGGSQVQLVESGGGVVQPGRSLRLSCAASGFTFSAYGMHW |
| | | | | VRQAPGKCLEWVAVILYDGSNKYYADSVKGRFTISRDNSKNTLYLQM |
| | | | | NSLRAEDTAVYYCARGSGWLQLGDYFDYWGQGTLVTVSSGGGGSGG |
| | | | | GGSGGGGSQSALTQPPSVSGSPGQSITISCTGTSSDVGGYNYVSWYQQ |
| | | | | HPGKAPKLMIYEVSNRPSGVSNRFSGSKSGNTASLTISGLQAEDEADYY |
| | | | | CSSYTSSSTLVFGCGTKLTVLSGGGGSEVQLVESGGGLVQPGGSLKLSC |
| | | | | AASGFTFNKYAINWVRQAPGKGLEWVARIRSKYNNYATYYADAVKD |
| | | | | RFTISRDDSKNTVYLQMNNLKTEDTAVYYCARAGNFGSSYISYWAYW |
| | | | | GQGTLVTVSSGGGGSGGGGSGGGGSQTVVTQEPSLTVSPGGTVTITCG |
| | | | | SSTGAVTSGNYPNWVQKKPGQAPRGLIGGTKFLAPGTPARFSGSLSGG |
| | | | | KAALTLSGVQPEDEAEYYCVLWYSNRWVFGSGTKLTVL |
| 314. | CD20 82-A3 CC x | arti- | aa | EVQLVESGGGLVQPDRSLRLSCAASGFTFRDYAMHWVRQAPGKCLE |
| | CD22 99-F10 CC | ficial | | WVSGIAWNSDSIGYADSVKGRFTISRDNAKNSLFLQMHSLRPEDTALY |
| | x I2E clipopt | | | FCAKDTLYGSGSPRAFDIWGQGTMVTVSSGGGGQGGGGQGGGGQEIV |
| | | | | LTQSPATLSVSPGERATLSCRASQSVNNNLAWYQQKPGQAPRLLIYGA |
| | | | | STRATGIPARFSGSGSGTEFTLTISRLEPEDFAVYYCQQSNNWPITFGCG |
| | | | | TRLEIKSGGGGQQVQLVESGGGVVQPGRSLRLSCAASGFTFSAYGMH |
| | | | | WVRQAPGKCLEWVAVILYDGSNKYYADSVKGRFTISRDNSKNTLYLQ |
| | | | | MNSLRAEDTAVYYCARGSGWLQLGDYFDYWGQGTLVTVSSGGGGQ |
| | | | | GGGGQGGGGQQSALTQPPSVSGSPGQSITISCTGTSSDVGGYNYVSWY |
| | | | | QQHPGKAPKLMIYEVSNRPSGVSNRFSGSKSGNTASLTISGLQAEDEAD |
| | | | | YYCSSYTSSSTLVFGCGTKLTVLSGGGGQEVQLVESGGGLVQPGGSLK |
| | | | | LSCAASGFTFNKYAINWVRQAPGKGLEWVARIRSKYNNYATYYADAV |
| | | | | KDRFTISRDDSKNTVYLQMNNLKTEDTAVYYCARAGNFGSSYISYWA |
| | | | | YWGQGTLVTVSSGGGGQGGGGQGGGGQQTVVTQEPSLTVSPGGTVTI |
| | | | | TCGSSTGAVTSGNYPNWVQKKPGQAPRGLIGGTKFLAPGTPARFSGSL |
| | | | | SGGKAALTLSGVQPEDEAEYYCVLWYSNRWVFGSGTKLTVL |
| 315. | CD20 82-A3 CC x | arti- | aa | EVQLVESGGGLVQPDRSLRLSCAASGFTFRDYAMHWVRQAPGKCLE |
| | CD22 99-F10 CC | ficial | | WVSGIAWNSDSIGYADSVKGRFTISRDNAKNSLFLQMHSLRPEDTALY |
| | x I2C x scFc | | | FCAKDTLYGSGSPRAFDIWGQGTMVTVSSGGGGSGGGGSGGGGSEIVL |
| | | | | TQSPATLSVSPGERATLSCRASQSVNNNLAWYQQKPGQAPRLLIYGAS |
| | | | | TRATGIPARFSGSGSGTEFTLTISRLEPEDFAVYYCQQSNNWPITFGCGT |
| | | | | RLEIKSGGGGSQVQLVESGGGVVQPGRSLRLSCAASGFTFSAYGMHW |
| | | | | VRQAPGKCLEWVAVILYDGSNKYYADSVKGRFTISRDNSKNTLYLQM |
| | | | | NSLRAEDTAVYYCARGSGWLQLGDYFDYWGQGTLVTVSSGGGGSGG |
| | | | | GGSGGGGSQSALTQPPSVSGSPGQSITISCTGTSSDVGGYNYVSWYQQ |
| | | | | HPGKAPKLMIYEVSNRPSGVSNRFSGSKSGNTASLTISGLQAEDEADYY |
| | | | | CSSYTSSSTLVFGCGTKLTVLSGGGGSEVQLVESGGGLVQPGGSLKLSC |
| | | | | AASGFTFNKYAMNWVRQAPGKGLEWVARIRSKYNNYATYYADSVKD |
| | | | | RFTISRDDSKNTAYLQMNNLKTEDTAVYYCVRHGNFGNSYISYWAYW |
| | | | | GQGTLVTVSSGGGGSGGGGSGGGGSQTVVTQEPSLTVSPGGTVTLTCG |
| | | | | SSTGAVTSGNYPNWVQQKPGQAPRGLIGGTKFLAPGTPARFSGSLLGG |
| | | | | KAALTLSGVQPEDEAEYYCVLWYSNRWVFGGGTKLTVLGGGGDKTH |
| | | | | TCPPCPAPELLGGPSVFLFPPKPKDTLMISRTPEVTCVVVDVSHEDPEVK |
| | | | | FNWYVDGVEVHNAKTKPCEEQYGSTYRCVSVLTVLHQDWLNGKEYK |
| | | | | CKVSNKALPAPIEKTISKAKGQPREPQVYTLPPSREEMTKNQVSLTCLV |
| | | | | KGFYPSDIAVEWESNGQPENNYKTTPPVLDSDGSFFLYSKLTVDKSRW |
| | | | | QQGNVFSCSVMHEALHNHYTQKSLSLSPGKGGGGSGGGGSGGGGSGG |
| | | | | GGSGGGGSGGGGSDKTHTCPPCPAPELLGGPSVFLFPPKPKDTLMISRT |
| | | | | PEVTCVVVDVSHEDPEVKFNWYVDGVEVHNAKTKPCEEQYGSTYRC |
| | | | | VSVLTVLHQDWLNGKEYKCKVSNKALPAPIEKTISKAKGQPREPQVYT |
| | | | | LPPSREEMTKNQVSLTCLVKGFYPSDIAVEWESNGQPENNYKTTPPVL |
| | | | | DSDGSFFLYSKLTVDKSRWQQGNVFSCSVMHEALHNHYTQKSLSLSP |
| | | | | GK |
| 316. | CD20 82-A3 CC x | arti- | aa | EVQLVESGGGLVQPDRSLRLSCAASGFTFRDYAMHWVRQAPGKCLE |
| | CD22 99-F10 CC | ficial | | WVSGIAWNSDSIGYADSVKGRFTISRDNAKNSLFLQMHSLRPEDTALY |
| | x I2C x scFc | | | FCAKDTLYGSGSPRAFDIWGQGTMVTVSSGGGGQGGGGQGGGGQEIV |
| | clipopt | | | LTQSPATLSVSPGERATLSCRASQSVNNNLAWYQQKPGQAPRLLIYGA |
| | | | | STRATGIPARFSGSGSGTEFTLTISRLEPEDFAVYYCQQSNNWPITFGCG |
| | | | | TRLEIKSGGGGQQVQLVESGGGVVQPGRSLRLSCAASGFTFSAYGMH |
| | | | | WVRQAPGKCLEWVAVILYDGSNKYYADSVKGRFTISRDNSKNTLYLQ |
| | | | | MNSLRAEDTAVYYCARGSGWLQLGDYFDYWGQGTLVTVSSGGGGQ |
| | | | | GGGGQGGGGQQSALTQPPSVSGSPGQSITISCTGTSSDVGGYNYVSWY |
| | | | | QQHPGKAPKLMIYEVSNRPSGVSNRFSGSKSGNTASLTISGLQAEDEAD |
| | | | | YYCSSYTSSSTLVFGCGTKLTVLSGGGGQEVQLVESGGGLVQPGGSLK |
| | | | | LSCAASGFTFNKYAMNWVRQAPGKGLEWVARIRSKYNNYATYYADS |
| | | | | VKDRFTISRDDSKNTAYLQMNNLKTEDTAVYYCVRHGNFGNSYISYW |
| | | | | AYWGQGTLVTVSSGGGGQGGGGQGGGGQQTVVTQEPSLTVSPGGTV |
| | | | | TLTCGSSTGAVTSGNYPNWVQQKPGQAPRGLIGGTKFLAPGTPARFSG |
| | | | | SLLGGKAALTLSGVQPEDEAEYYCVLWYSNRWVFGGGTKLTVLGGG |
| | | | | GCPPCPAPELLGGPSVFLFPPKPKDTLMISRTPEVTCVVVDVSHEEPEVK |
| | | | | FNWYVDGVEVHNAKTKPCEEQYGSTYRCVSVLTVLHQDWLNGKEYK |
| | | | | CKVSNKALPAPIEKTISKAKGQPREPQVYTLPPSREEMTKNQVSLTCLV |
| | | | | KGFYPSDIAVEWESNGQPENNYKTTPPVLDSDGSFFLYSKLTVDKSRW |
| | | | | QQGNVFSCSVMHEALHNHYTQKSLSLSPGKGGGGQGGGGQGGGGQG |
| | | | | GGGQGGGGQGGGGQCPPCPAPELLGGPSVFLFPPKPKDTLMISRTPEVT |
| | | | | CVVVDVSHEEPEVKFNWYVDGVEVHNAKTKPCEEQYGSTYRCVSVLT |
| | | | | VLHQDWLNGKEYKCKVSNKALPAPIEKTISKAKGQPREPQVYTLPPSR |
| | | | | EEMTKNQVSLTCLVKGFYPSDIAVEWESNGQPENNYKTTPPVLDSDGS |
| | | | | FFLYSKLTVDKSRWQQGNVFSCSVMHEALHNHYTQKSLSLSPGK |
| 317. | CD20 82-A3 CC x | arti- | aa | EVQLVESGGGLVQPDRSLRLSCAASGFTFRDYAMHWVRQAPGKCLE |
| | CD22 99-F10 CC | ficial | | WVSGIAWNSDSIGYADSVKGRFTISRDNAKNSLFLQMHSLRPEDTALY |
| | x I2E x scFc | | | FCAKDTLYGSGSPRAFDIWGQGTMVTVSSGGGGSGGGGSGGGGSEIVL |
| | | | | TQSPATLSVSPGERATLSCRASQSVNNNLAWYQQKPGQAPRLLIYGAS |
| | | | | TRATGIPARFSGSGSGTEFTLTISRLEPEDFAVYYCQQSNNWPITFGCGT |
| | | | | RLEIKSGGGGSQVQLVESGGGVVQPGRSLRLSCAASGFTFSAYGMHW |
| | | | | VRQAPGKCLEWVAVILYDGSNKYYADSVKGRFTISRDNSKNTLYLQM |
| | | | | NSLRAEDTAVYYCARGSGWLQLGDYFDYWGQGTLVTVSSGGGGSGG |
| | | | | GGSGGGGSQSALTQPPSVSGSPGQSITISCTGTSSDVGGYNYVSWYQQ |
| | | | | HPGKAPKLMIYEVSNRPSGVSNRFSGSKSGNTASLTISGLQAEDEADYY |
| | | | | CSSYTSSSTLVFGCGTKLTVLSGGGGSEVQLVESGGGLVQPGGSLKLSC |
| | | | | AASGFTFNKYAINWVRQAPGKGLEWVARIRSKYNNYATYYADAVKD |
| | | | | RFTISRDDSKNTVYLQMNNLKTEDTAVYYCARAGNFGSSYISYWAYW |
| | | | | GQGTLVTVSSGGGGSGGGGSGGGGSQTVVTQEPSLTVSPGGTVTITCG |
| | | | | SSTGAVTSGNYPNWVQKKPGQAPRGLIGGTKFLAPGTPARFSGSLSGG |
| | | | | KAALTLSGVQPEDEAEYYCVLWYSNRWVFGSGTKLTVLGGGGDKTH |
| | | | | TCPPCPAPELLGGPSVFLFPPKPKDTLMISRTPEVTCVVVDVSHEDPEVK |
| | | | | FNWYVDGVEVHNAKTKPCEEQYGSTYRCVSVLTVLHQDWLNGKEYK |
| | | | | CKVSNKALPAPIEKTISKAKGQPREPQVYTLPPSREEMTKNQVSLTCLV |
| | | | | KGFYPSDIAVEWESNGQPENNYKTTPPVLDSDGSFFLYSKLTVDKSRW |
| | | | | QQGNVFSCSVMHEALHNHYTQKSLSLSPGKGGGGSGGGGSGGGGSGG |
| | | | | GGSGGGGSGGGGSDKTHTCPPCPAPELLGGPSVFLFPPKPKDTLMISRT |
| | | | | PEVTCVVVDVSHEDPEVKFNWYVDGVEVHNAKTKPCEEQYGSTYRC |
| | | | | VSVLTVLHQDWLNGKEYKCKVSNKALPAPIEKTISKAKGQPREPQVYT |
| | | | | LPPSREEMTKNQVSLTCLVKGFYPSDIAVEWESNGQPENNYKTTPPVL |
| | | | | DSDGSFFLYSKLTVDKSRWQQGNVFSCSVMHEALHNHYTQKSLSLSP |
| | | | | GK |
| 318. | CD20 82-A3 CC x | arti- | aa | EVQLVESGGGLVQPDRSLRLSCAASGFTFRDYAMHWVRQAPGKCLE |
| | CD22 99-F10 CC | ficial | | WVSGIAWNSDSIGYADSVKGRFTISRDNAKNSLFLQMHSLRPEDTALY |
| | x I2E x scFc | | | FCAKDTLYGSGSPRAFDIWGQGTMVTVSSGGGGQGGGGQGGGGQEIV |
| | clipopt | | | LTQSPATLSVSPGERATLSCRASQSVNNNLAWYQQKPGQAPRLLIYGA |
| | | | | STRATGIPARFSGSGSGTEFTLTISRLEPEDFAVYYCQQSNNWPITFGCG |
| | | | | TRLEIKSGGGGQQVQLVESGGGVVQPGRSLRLSCAASGFTFSAYGMH |
| | | | | WVRQAPGKCLEWVAVILYDGSNKYYADSVKGRFTISRDNSKNTLYLQ |
| | | | | MNSLRAEDTAVYYCARGSGWLQLGDYFDYWGQGTLVTVSSGGGGQ |
| | | | | GGGGQGGGGQQSALTQPPSVSGSPGQSITISCTGTSSDVGGYNYVSWY |
| | | | | QQHPGKAPKLMIYEVSNRPSGVSNRFSGSKSGNTASLTISGLQAEDEAD |
| | | | | YYCSSYTSSSTLVFGCGTKLTVLSGGGGQEVQLVESGGGLVQPGGSLK |
| | | | | LSCAASGFTFNKYAINWVRQAPGKGLEWVARIRSKYNNYATYYADAV |
| | | | | KDRFTISRDDSKNTVYLQMNNLKTEDTAVYYCARAGNFGSSYISYWA |
| | | | | YWGQGTLVTVSSGGGGQGGGGQGGGGQQTVVTQEPSLTVSPGGTVTI |
| | | | | TCGSSTGAVTSGNYPNWVQKKPGQAPRGLIGGTKFLAPGTPARFSGSL |
| | | | | SGGKAALTLSGVQPEDEAEYYCVLWYSNRWVFGSGTKLTVLGGGGCP |
| | | | | PCPAPELLGGPSVFLFPPKPKDTLMISRTPEVTCVVVDVSHEEPEVKFN |
| | | | | WYVDGVEVHNAKTKPCEEQYGSTYRCVSVLTVLHQDWLNGKEYKCK |
| | | | | VSNKALPAPIEKTISKAKGQPREPQVYTLPPSREEMTKNQVSLTCLVKG |
| | | | | FYPSDIAVEWESNGQPENNYKTTPPVLDSDGSFFLYSKLTVDKSRWQQ |
| | | | | GNVFSCSVMHEALHNHYTQKSLSLSPGKGGGGQGGGGQGGGGQGGG |
| | | | | GQGGGGQGGGGQCPPCPAPELLGGPSVFLFPPKPKDTLMISRTPEVTCV |
| | | | | VVDVSHEEPEVKFNWYVDGVEVHNAKTKPCEEQYGSTYRCVSVLTVL |
| | | | | HQDWLNGKEYKCKVSNKALPAPIEKTISKAKGQPREPQVYTLPPSREE |
| | | | | MTKNQVSLTCLVKGFYPSDIAVEWESNGQPENNYKTTPPVLDSDGSFF |
| | | | | LYSKLTVDKSRWQQGNVFSCSVMHEALHNHYTQKSLSLSPGK |
| 319. | CD20 82-D2 CC x | arti- | aa | EVQLLESGGGLVQPGGSLRLSCAASGFTFSGHAMTWVRQAPGKCLEW |
| | CD22 43-A8 CC | ficial | | LSTIYGSGGYTYYAGSVKGRFTISRDNSKNTLYLQMNSLRAEDTAVYY |
| | | | | CAKVGGYDWYFDLWGRGTLVTVSSGGGGSGGGGSGGGGSSYELTQP |
| | | | | PSVSVALGQTARITCGGHNIGSKNVHWYQQKPGQAPVLVIYRDTNRPS |
| | | | | GIPERFSGSNSGNTATLTISRAQAGDEADYYCQLWDSTTVVFGCGTKL |
| | | | | TVLSGGGGSQVQLVQSGGEVKKPGASVKVSCKASGYTFTSYGISWVR |
| | | | | QAPGQCLEWMGWISAYTGETLYAQKLQGRVTMTRDTSTSTAYMELR |
| | | | | SLRSDDTAVYYCARDPDYYGSGSYSDYWGQGTLVTVSSGGGGSGGG |
| | | | | GSGGGGSEIVLTQSPATLSVSPGERATLSCRASQSVSSNLAWYQQKPG |
| | | | | QAPRLLIYGASSRATGIPARFSGSGSGTEFTLTISSLQSEDFAVYYCQQY |
| | | | | HSWPLLTFGCGTKVEIK |
| 320. | CD20 82-D2 CC x | arti- | aa | EVQLLESGGGLVQPGGSLRLSCAASGFTFSGHAMTWVRQAPGKCLEW |
| | CD22 43-A8 CC | ficial | | LSTIYGSGGYTYYAGSVKGRFTISRDNSKNTLYLQMNSLRAEDTAVYY |
| | clipopt | | | CAKVGGYDWYFDLWGRGTLVTVSSGGGGQGGGGQGGGGQSYELTQ |
| | | | | PPSVSVALGQTARITCGGHNIGSKNVHWYQQKPGQAPVLVIYRDTNRP |
| | | | | SGIPERFSGSNSGNTATLTISRAQAGDEADYYCQLWDSTTVVFGCGTK |
| | | | | LTVLSGGGGQQVQLVQSGGEVKKPGASVKVSCKASGYTFTSYGISWV |
| | | | | RQAPGQCLEWMGWISAYTGETLYAQKLQGRVTMTRDTSTSTAYMEL |
| | | | | RSLRSDDTAVYYCARDPDYYGSGSYSDYWGQGTLVTVSSGGGGQGG |
| | | | | GGQGGGGQEIVLTQSPATLSVSPGERATLSCRASQSVSSNLAWYQQKP |
| | | | | GQAPRLLIYGASSRATGIPARFSGSGSGTEFTLTISSLQSEDFAVYYCQQ |
| | | | | YHSWPLLTFGCGTKVEIK |
| 321. | CD20 82-D2 CC x | arti- | aa | EVQLLESGGGLVQPGGSLRLSCAASGFTFSGHAMTWVRQAPGKCLEW |
| | CD22 43-A8 CC x | ficial | | LSTIYGSGGYTYYAGSVKGRFTISRDNSKNTLYLQMNSLRAEDTAVYY |
| | I2C | | | CAKVGGYDWYFDLWGRGTLVTVSSGGGGSGGGGSGGGGSSYELTQP |
| | | | | PSVSVALGQTARITCGGHNIGSKNVHWYQQKPGQAPVLVIYRDTNRPS |
| | | | | GIPERFSGSNSGNTATLTISRAQAGDEADYYCQLWDSTTVVFGCGTKL |
| | | | | TVLSGGGGSQVQLVQSGGEVKKPGASVKVSCKASGYTFTSYGISWVR |
| | | | | QAPGQCLEWMGWISAYTGETLYAQKLQGRVTMTRDTSTSTAYMELR |
| | | | | SLRSDDTAVYYCARDPDYYGSGSYSDYWGQGTLVTVSSGGGGSGGG |
| | | | | GSGGGGSEIVLTQSPATLSVSPGERATLSCRASQSVSSNLAWYQQKPG |
| | | | | QAPRLLIYGASSRATGIPARFSGSGSGTEFTLTISSLQSEDFAVYYCQQY |
| | | | | HSWPLLTFGCGTKVEIKSGGGGSEVQLVESGGGLVQPGGSLKLSCAAS |
| | | | | GFTFNKYAMNWVRQAPGKGLEWVARIRSKYNNYATYYADSVKDRFT |
| | | | | ISRDDSKNTAYLQMNNLKTEDTAVYYCVRHGNFGNSYISYWAYWGQ |
| | | | | GTLVTVSSGGGGSGGGGSGGGGSQTVVTQEPSLTVSPGGTVTLTCGSS |
| | | | | TGAVTSGNYPNWVQQKPGQAPRGLIGGTKFLAPGTPARFSGSLLGGKA |
| | | | | ALTLSGVQPEDEAEYYCVLWYSNRWVFGGGTKLTVL |
| 322. | CD20 82-D2 CC x | arti- | aa | EVQLLESGGGLVQPGGSLRLSCAASGFTFSGHAMTWVRQAPGKCLEW |
| | CD22 43-A8 CC x | ficial | | LSTIYGSGGYTYYAGSVKGRFTISRDNSKNTLYLQMNSLRAEDTAVYY |
| | I2C clipopt | | | CAKVGGYDWYFDLWGRGTLVTVSSGGGGQGGGGQGGGGQSYELTQ |
| | | | | PPSVSVALGQTARITCGGHNIGSKNVHWYQQKPGQAPVLVIYRDTNRP |
| | | | | SGIPERFSGSNSGNTATLTISRAQAGDEADYYCQLWDSTTVVFGCGTK |
| | | | | LTVLSGGGGQQVQLVQSGGEVKKPGASVKVSCKASGYTFTSYGISWV |
| | | | | RQAPGQCLEWMGWISAYTGETLYAQKLQGRVTMTRDTSTSTAYMEL |
| | | | | RSLRSDDTAVYYCARDPDYYGSGSYSDYWGQGTLVTVSSGGGGQGG |
| | | | | GGQGGGGQEIVLTQSPATLSVSPGERATLSCRASQSVSSNLAWYQQKP |
| | | | | GQAPRLLIYGASSRATGIPARFSGSGSGTEFTLTISSLQSEDFAVYYCQQ |
| | | | | YHSWPLLTFGCGTKVEIKSGGGGQEVQLVESGGGLVQPGGSLKLSCAA |
| | | | | SGFTFNKYAMNWVRQAPGKGLEWVARIRSKYNNYATYYADSVKDRF |
| | | | | TISRDDSKNTAYLQMNNLKTEDTAVYYCVRHGNFGNSYISYWAYWG |
| | | | | QGTLVTVSSGGGGQGGGGQGGGGQQTVVTQEPSLTVSPGGTVTLTCG |
| | | | | SSTGAVTSGNYPNWVQQKPGQAPRGLIGGTKFLAPGTPARFSGSLLGG |
| | | | | KAALTLSGVQPEDEAEYYCVLWYSNRWVFGGGTKLTVL |
| 323. | CD20 82-D2 CC x | arti- | aa | EVQLLESGGGLVQPGGSLRLSCAASGFTFSGHAMTWVRQAPGKCLEW |
| | CD22 43-A8 CC x | ficial | | LSTIYGSGGYTYYAGSVKGRFTISRDNSKNTLYLQMNSLRAEDTAVYY |
| | I2E | | | CAKVGGYDWYFDLWGRGTLVTVSSGGGGSGGGGSGGGGSSYELTQP |
| | | | | PSVSVALGQTARITCGGHNIGSKNVHWYQQKPGQAPVLVIYRDTNRPS |
| | | | | GIPERFSGSNSGNTATLTISRAQAGDEADYYCQLWDSTTVVFGCGTKL |
| | | | | TVLSGGGGSQVQLVQSGGEVKKPGASVKVSCKASGYTFTSYGISWVR |
| | | | | QAPGQCLEWMGWISAYTGETLYAQKLQGRVTMTRDTSTSTAYMELR |
| | | | | SLRSDDTAVYYCARDPDYYGSGSYSDYWGQGTLVTVSSGGGGSGGG |
| | | | | GSGGGGSEIVLTQSPATLSVSPGERATLSCRASQSVSSNLAWYQQKPG |
| | | | | QAPRLLIYGASSRATGIPARFSGSGSGTEFTLTISSLQSEDFAVYYCQQY |
| | | | | HSWPLLTFGCGTKVEIKSGGGGSEVQLVESGGGLVQPGGSLKLSCAAS |
| | | | | GFTFNKYAINWVRQAPGKGLEWVARIRSKYNNYATYYADAVKDRFTI |
| | | | | SRDDSKNTVYLQMNNLKTEDTAVYYCARAGNFGSSYISYWAYWGQG |
| | | | | TLVTVSSGGGGSGGGGSGGGGSQTVVTQEPSLTVSPGGTVTITCGSSTG |
| | | | | AVTSGNYPNWVQKKPGQAPRGLIGGTKFLAPGTPARFSGSLSGGKAAL |
| | | | | TLSGVQPEDEAEYYCVLWYSNRWVFGSGTKLTVL |
| 324. | CD20 82-D2 CC x | arti- | aa | EVQLLESGGGLVQPGGSLRLSCAASGFTFSGHAMTWVRQAPGKCLEW |
| | CD22 43-A8 CC x | ficial | | LSTIYGSGGYTYYAGSVKGRFTISRDNSKNTLYLQMNSLRAEDTAVYY |
| | I2E clipopt | | | CAKVGGYDWYFDLWGRGTLVTVSSGGGGQGGGGQGGGGQSYELTQ |
| | | | | PPSVSVALGQTARITCGGHNIGSKNVHWYQQKPGQAPVLVIYRDTNRP |
| | | | | SGIPERFSGSNSGNTATLTISRAQAGDEADYYCQLWDSTTVVFGCGTK |
| | | | | LTVLSGGGGQQVQLVQSGGEVKKPGASVKVSCKASGYTFTSYGISWV |
| | | | | RQAPGQCLEWMGWISAYTGETLYAQKLQGRVTMTRDTSTSTAYMEL |
| | | | | RSLRSDDTAVYYCARDPDYYGSGSYSDYWGQGTLVTVSSGGGGQGG |
| | | | | GGQGGGGQEIVLTQSPATLSVSPGERATLSCRASQSVSSNLAWYQQKP |
| | | | | GQAPRLLIYGASSRATGIPARFSGSGSGTEFTLTISSLQSEDFAVYYCQQ |
| | | | | YHSWPLLTFGCGTKVEIKSGGGGQEVQLVESGGGLVQPGGSLKLSCAA |
| | | | | SGFTFNKYAINWVRQAPGKGLEWVARIRSKYNNYATYYADAVKDRFT |
| | | | | ISRDDSKNTVYLQMNNLKTEDTAVYYCARAGNFGSSYISYWAYWGQ |
| | | | | GTLVTVSSGGGGQGGGGQGGGGQQTVVTQEPSLTVSPGGTVTITCGSS |
| | | | | TGAVTSGNYPNWVQKKPGQAPRGLIGGTKFLAPGTPARFSGSLSGGKA |
| | | | | ALTLSGVQPEDEAEYYCVLWYSNRWVFGSGTKLTVL |
| 325. | CD20 82-D2 CC x | arti- | aa | EVQLLESGGGLVQPGGSLRLSCAASGFTFSGHAMTWVRQAPGKCLEW |
| | CD22 43-A8 CC x | ficial | | LSTIYGSGGYTYYAGSVKGRFTISRDNSKNTLYLQMNSLRAEDTAVYY |
| | I2C x scFc | | | CAKVGGYDWYFDLWGRGTLVTVSSGGGGSGGGGSGGGGSSYELTQP |
| | | | | PSVSVALGQTARITCGGHNIGSKNVHWYQQKPGQAPVLVIYRDTNRPS |
| | | | | GIPERFSGSNSGNTATLTISRAQAGDEADYYCQLWDSTTVVFGCGTKL |
| | | | | TVLSGGGGSQVQLVQSGGEVKKPGASVKVSCKASGYTFTSYGISWVR |
| | | | | QAPGQCLEWMGWISAYTGETLYAQKLQGRVTMTRDTSTSTAYMELR |
| | | | | SLRSDDTAVYYCARDPDYYGSGSYSDYWGQGTLVTVSSGGGGSGGG |
| | | | | GSGGGGSEIVLTQSPATLSVSPGERATLSCRASQSVSSNLAWYQQKPG |
| | | | | QAPRLLIYGASSRATGIPARFSGSGSGTEFTLTISSLQSEDFAVYYCQQY |
| | | | | HSWPLLTFGCGTKVEIKSGGGGSEVQLVESGGGLVQPGGSLKLSCAAS |
| | | | | GFTFNKYAMNWVRQAPGKGLEWVARIRSKYNNYATYYADSVKDRFT |
| | | | | ISRDDSKNTAYLQMNNLKTEDTAVYYCVRHGNFGNSYISYWAYWGQ |
| | | | | GTLVTVSSGGGGSGGGGSGGGGSQTVVTQEPSLTVSPGGTVTLTCGSS |
| | | | | TGAVTSGNYPNWVQQKPGQAPRGLIGGTKFLAPGTPARFSGSLLGGKA |
| | | | | ALTLSGVQPEDEAEYYCVLWYSNRWVFGGGTKLTVLGGGGDKTHTC |
| | | | | PPCPAPELLGGPSVFLFPPKPKDTLMISRTPEVTCVVVDVSHEDPEVKFN |
| | | | | WYVDGVEVHNAKTKPCEEQYGSTYRCVSVLTVLHQDWLNGKEYKCK |
| | | | | VSNKALPAPIEKTISKAKGQPREPQVYTLPPSREEMTKNQVSLTCLVKG |
| | | | | FYPSDIAVEWESNGQPENNYKTTPPVLDSDGSFFLYSKLTVDKSRWQQ |
| | | | | GNVFSCSVMHEALHNHYTQKSLSLSPGKGGGGSGGGGSGGGGSGGGG |
| | | | | SGGGGSGGGGSDKTHTCPPCPAPELLGGPSVFLFPPKPKDTLMISRTPE |
| | | | | VTCVVVDVSHEDPEVKFNWYVDGVEVHNAKTKPCEEQYGSTYRCVS |
| | | | | VLTVLHQDWLNGKEYKCKVSNKALPAPIEKTISKAKGQPREPQVYTLP |
| | | | | PSREEMTKNQVSLTCLVKGFYPSDIAVEWESNGQPENNYKTTPPVLDS |
| | | | | DGSFFLYSKLTVDKSRWQQGNVFSCSVMHEALHNHYTQKSLSLSPGK |
| 326. | CD20 82-D2 CC x | arti- | aa | EVQLLESGGGLVQPGGSLRLSCAASGFTFSGHAMTWVRQAPGKCLEW |
| | CD22 43-A8 CC x | ficial | | LSTIYGSGGYTYYAGSVKGRFTISRDNSKNTLYLQMNSLRAEDTAVYY |
| | I2C x scFc | | | CAKVGGYDWYFDLWGRGTLVTVSSGGGGQGGGGQGGGGQSYELTQ |
| | clipopt | | | PPSVSVALGQTARITCGGHNIGSKNVHWYQQKPGQAPVLVIYRDTNRP |
| | | | | SGIPERFSGSNSGNTATLTISRAQAGDEADYYCQLWDSTTVVFGCGTK |
| | | | | LTVLSGGGGQQVQLVQSGGEVKKPGASVKVSCKASGYTFTSYGISWV |
| | | | | RQAPGQCLEWMGWISAYTGETLYAQKLQGRVTMTRDTSTSTAYMEL |
| | | | | RSLRSDDTAVYYCARDPDYYGSGSYSDYWGQGTLVTVSSGGGGQGG |
| | | | | GGQGGGGQEIVLTQSPATLSVSPGERATLSCRASQSVSSNLAWYQQKP |
| | | | | GQAPRLLIYGASSRATGIPARFSGSGSGTEFTLTISSLQSEDFAVYYCQQ |
| | | | | YHSWPLLTFGCGTKVEIKSGGGGQEVQLVESGGGLVQPGGSLKLSCAA |
| | | | | SGFTFNKYAMNWVRQAPGKGLEWVARIRSKYNNYATYYADSVKDRF |
| | | | | TISRDDSKNTAYLQMNNLKTEDTAVYYCVRHGNFGNSYISYWAYWG |
| | | | | QGTLVTVSSGGGGQGGGGQGGGGQQTVVTQEPSLTVSPGGTVTLTCG |
| | | | | SSTGAVTSGNYPNWVQQKPGQAPRGLIGGTKFLAPGTPARFSGSLLGG |
| | | | | KAALTLSGVQPEDEAEYYCVLWYSNRWVFGGGTKLTVLGGGGCPPCP |
| | | | | APELLGGPSVFLFPPKPKDTLMISRTPEVTCVVVDVSHEEPEVKFNWYV |
| | | | | DGVEVHNAKTKPCEEQYGSTYRCVSVLTVLHQDWLNGKEYKCKVSN |
| | | | | KALPAPIEKTISKAKGQPREPQVYTLPPSREEMTKNQVSLTCLVKGFYP |
| | | | | SDIAVEWESNGQPENNYKTTPPVLDSDGSFFLYSKLTVDKSRWQQGNV |
| | | | | FSCSVMHEALHNHYTQKSLSLSPGKGGGGQGGGGQGGGGQGGGGQG |
| | | | | GGGQGGGGQCPPCPAPELLGGPSVFLFPPKPKDTLMISRTPEVTCVVVD |
| | | | | VSHEEPEVKFNWYVDGVEVHNAKTKPCEEQYGSTYRCVSVLTVLHQD |
| | | | | WLNGKEYKCKVSNKALPAPIEKTISKAKGQPREPQVYTLPPSREEMTK |
| | | | | NQVSLTCLVKGFYPSDIAVEWESNGQPENNYKTTPPVLDSDGSFFLYS |
| | | | | KLTVDKSRWQQGNVFSCSVMHEALHNHYTQKSLSLSPGK |
| 327. | CD20 82-D2 CC x | arti- | aa | EVQLLESGGGLVQPGGSLRLSCAASGFTFSGHAMTWVRQAPGKCLEW |
| | CD22 43-A8 CC x | ficial | | LSTIYGSGGYTYYAGSVKGRFTISRDNSKNTLYLQMNSLRAEDTAVYY |
| | I2E x scFc | | | CAKVGGYDWYFDLWGRGTLVTVSSGGGGSGGGGSGGGGSSYELTQP |
| | | | | PSVSVALGQTARITCGGHNIGSKNVHWYQQKPGQAPVLVIYRDTNRPS |
| | | | | GIPERFSGSNSGNTATLTISRAQAGDEADYYCQLWDSTTVVFGCGTKL |
| | | | | TVLSGGGGSQVQLVQSGGEVKKPGASVKVSCKASGYTFTSYGISWVR |
| | | | | QAPGQCLEWMGWISAYTGETLYAQKLQGRVTMTRDTSTSTAYMELR |
| | | | | SLRSDDTAVYYCARDPDYYGSGSYSDYWGQGTLVTVSSGGGGSGGG |
| | | | | GSGGGGSEIVLTQSPATLSVSPGERATLSCRASQSVSSNLAWYQQKPG |
| | | | | QAPRLLIYGASSRATGIPARFSGSGSGTEFTLTISSLQSEDFAVYYCQQY |
| | | | | HSWPLLTFGCGTKVEIKSGGGGSEVQLVESGGGLVQPGGSLKLSCAAS |
| | | | | GFTFNKYAINWVRQAPGKGLEWVARIRSKYNNYATYYADAVKDRFTI |
| | | | | SRDDSKNTVYLQMNNLKTEDTAVYYCARAGNFGSSYISYWAYWGQG |
| | | | | TLVTVSSGGGGSGGGGSGGGGSQTVVTQEPSLTVSPGGTVTITCGSSTG |
| | | | | AVTSGNYPNWVQKKPGQAPRGLIGGTKFLAPGTPARFSGSLSGGKAAL |
| | | | | TLSGVQPEDEAEYYCVLWYSNRWVFGSGTKLTVLGGGGDKTHTCPPC |
| | | | | PAPELLGGPSVFLFPPKPKDTLMISRTPEVTCVVVDVSHEDPEVKFNWY |
| | | | | VDGVEVHNAKTKPCEEQYGSTYRCVSVLTVLHQDWLNGKEYKCKVS |
| | | | | NKALPAPIEKTISKAKGQPREPQVYTLPPSREEMTKNQVSLTCLVKGFY |
| | | | | PSDIAVEWESNGQPENNYKTTPPVLDSDGSFFLYSKLTVDKSRWQQGN |
| | | | | VFSCSVMHEALHNHYTQKSLSLSPGKGGGGSGGGGSGGGGSGGGGSG |
| | | | | GGGSGGGGSDKTHTCPPCPAPELLGGPSVFLFPPKPKDTLMISRTPEVT |
| | | | | CVVVDVSHEDPEVKFNWYVDGVEVHNAKTKPCEEQYGSTYRCVSVL |
| | | | | TVLHQDWLNGKEYKCKVSNKALPAPIEKTISKAKGQPREPQVYTLPPS |
| | | | | REEMTKNQVSLTCLVKGFYPSDIAVEWESNGQPENNYKTTPPVLDSDG |
| | | | | SFFLYSKLTVDKSRWQQGNVFSCSVMHEALHNHYTQKSLSLSPGK |
| 328. | CD20 82-D2 CC x | arti- | aa | EVQLLESGGGLVQPGGSLRLSCAASGFTFSGHAMTWVRQAPGKCLEW |
| | CD22 43-A8 CC x | ficial | | LSTIYGSGGYTYYAGSVKGRFTISRDNSKNTLYLQMNSLRAEDTAVYY |
| | I2E x scFc | | | CAKVGGYDWYFDLWGRGTLVTVSSGGGGQGGGGQGGGGQSYELTQ |
| | clipopt | | | PPSVSVALGQTARITCGGHNIGSKNVHWYQQKPGQAPVLVIYRDTNRP |
| | | | | SGIPERFSGSNSGNTATLTISRAQAGDEADYYCQLWDSTTVVFGCGTK |
| | | | | LTVLSGGGGQQVQLVQSGGEVKKPGASVKVSCKASGYTFTSYGISWV |
| | | | | RQAPGQCLEWMGWISAYTGETLYAQKLQGRVTMTRDTSTSTAYMEL |
| | | | | RSLRSDDTAVYYCARDPDYYGSGSYSDYWGQGTLVTVSSGGGGQGG |
| | | | | GGQGGGGQEIVLTQSPATLSVSPGERATLSCRASQSVSSNLAWYQQKP |
| | | | | GQAPRLLIYGASSRATGIPARFSGSGSGTEFTLTISSLQSEDFAVYYCQQ |
| | | | | YHSWPLLTFGCGTKVEIKSGGGGQEVQLVESGGGLVQPGGSLKLSCAA |
| | | | | SGFTFNKYAINWVRQAPGKGLEWVARIRSKYNNYATYYADAVKDRFT |
| | | | | ISRDDSKNTVYLQMNNLKTEDTAVYYCARAGNFGSSYISYWAYWGQ |
| | | | | GTLVTVSSGGGGQGGGGQGGGGQQTVVTQEPSLTVSPGGTVTITCGSS |
| | | | | TGAVTSGNYPNWVQKKPGQAPRGLIGGTKFLAPGTPARFSGSLSGGKA |
| | | | | ALTLSGVQPEDEAEYYCVLWYSNRWVFGSGTKLTVLGGGGCPPCPAP |
| | | | | ELLGGPSVFLFPPKPKDTLMISRTPEVTCVVVDVSHEEPEVKFNWYVD |
| | | | | GVEVHNAKTKPCEEQYGSTYRCVSVLTVLHQDWLNGKEYKCKVSNK |
| | | | | ALPAPIEKTISKAKGQPREPQVYTLPPSREEMTKNQVSLTCLVKGFYPS |
| | | | | DIAVEWESNGQPENNYKTTPPVLDSDGSFFLYSKLTVDKSRWQQGNVF |
| | | | | SCSVMHEALHNHYTQKSLSLSPGKGGGGQGGGGQGGGGQGGGGQGG |
| | | | | GGQGGGGQCPPCPAPELLGGPSVFLFPPKPKDTLMISRTPEVTCVVVDV |
| | | | | SHEEPEVKFNWYVDGVEVHNAKTKPCEEQYGSTYRCVSVLTVLHQD |
| | | | | WLNGKEYKCKVSNKALPAPIEKTISKAKGQPREPQVYTLPPSREEMTK |
| | | | | NQVSLTCLVKGFYPSDIAVEWESNGQPENNYKTTPPVLDSDGSFFLYS |
| | | | | KLTVDKSRWQQGNVFSCSVMHEALHNHYTQKSLSLSPGK |
| 329. | CD20 82-D2 CC x | arti- | aa | EVQLLESGGGLVQPGGSLRLSCAASGFTFSGHAMTWVRQAPGKCLEW |
| | CD22 53-G9 CC | ficial | | LSTIYGSGGYTYYAGSVKGRFTISRDNSKNTLYLQMNSLRAEDTAVYY |
| | | | | CAKVGGYDWYFDLWGRGTLVTVSSGGGGSGGGGSGGGGSSYELTQP |
| | | | | PSVSVALGQTARITCGGHNIGSKNVHWYQQKPGQAPVLVIYRDTNRPS |
| | | | | GIPERFSGSNSGNTATLTISRAQAGDEADYYCQLWDSTTVVFGCGTKL |
| | | | | TVLSGGGGSQVQLVQSGAEVKKPGESLKISCKGSGYSFTSYGISWVRQ |
| | | | | APGQCLEWMGWISAYNGNTIYAQKLQGRVTMTTDTSTSTAYMELRRL |
| | | | | RSDDTAVYYCARDPGVTGDDYWGQGTLVTVSSGGGGSGGGGSGGGG |
| | | | | SEIVLTQSPATLSVSPGERATLSCRASLSVSSNLAWYQQKPGQAPRLLIY |
| | | | | GASTRATGIPARFSGSGSGTEFTLTISSLQSEDFAVYFCQQYHSWPALTF |
| | | | | GCGTKVEIK |
| 330. | CD20 82-D2 CC x | arti- | aa | EVQLLESGGGLVQPGGSLRLSCAASGFTFSGHAMTWVRQAPGKCLEW |
| | CD22 53-G9 CC | ficial | | LSTIYGSGGYTYYAGSVKGRFTISRDNSKNTLYLQMNSLRAEDTAVYY |
| | clipopt | | | CAKVGGYDWYFDLWGRGTLVTVSSGGGGQGGGGQGGGGQSYELTQ |
| | | | | PPSVSVALGQTARITCGGHNIGSKNVHWYQQKPGQAPVLVIYRDTNRP |
| | | | | SGIPERFSGSNSGNTATLTISRAQAGDEADYYCQLWDSTTVVFGCGTK |
| | | | | LTVLSGGGGQQVQLVQSGAEVKKPGESLKISCKGSGYSFTSYGISWVR |
| | | | | QAPGQCLEWMGWISAYNGNTIYAQKLQGRVTMTTDTSTSTAYMELR |
| | | | | RLRSDDTAVYYCARDPGVTGDDYWGQGTLVTVSSGGGGQGGGGQG |
| | | | | GGGQEIVLTQSPATLSVSPGERATLSCRASLSVSSNLAWYQQKPGQAP |
| | | | | RLLIYGASTRATGIPARFSGSGSGTEFTLTISSLQSEDFAVYFCQQYHSW |
| | | | | PALTFGCGTKVEIK |
| 331. | CD20 82-D2 CC x | arti- | aa | EVQLLESGGGLVQPGGSLRLSCAASGFTFSGHAMTWVRQAPGKCLEW |
| | CD22 53-G9 CC x | ficial | | LSTIYGSGGYTYYAGSVKGRFTISRDNSKNTLYLQMNSLRAEDTAVYY |
| | I2C | | | CAKVGGYDWYFDLWGRGTLVTVSSGGGGSGGGGSGGGGSSYELTQP |
| | | | | PSVSVALGQTARITCGGHNIGSKNVHWYQQKPGQAPVLVIYRDTNRPS |
| | | | | GIPERFSGSNSGNTATLTISRAQAGDEADYYCQLWDSTTVVFGCGTKL |
| | | | | TVLSGGGGSQVQLVQSGAEVKKPGESLKISCKGSGYSFTSYGISWVRQ |
| | | | | APGQCLEWMGWISAYNGNTIYAQKLQGRVTMTTDTSTSTAYMELRRL |
| | | | | RSDDTAVYYCARDPGVTGDDYWGQGTLVTVSSGGGGSGGGGSGGGG |
| | | | | SEIVLTQSPATLSVSPGERATLSCRASLSVSSNLAWYQQKPGQAPRLLIY |
| | | | | GASTRATGIPARFSGSGSGTEFTLTISSLQSEDFAVYFCQQYHSWPALTF |
| | | | | GCGTKVEIKSGGGGSEVQLVESGGGLVQPGGSLKLSCAASGFTFNKYA |
| | | | | MNWVRQAPGKGLEWVARIRSKYNNYATYYADSVKDRFTISRDDSKN |
| | | | | TAYLQMNNLKTEDTAVYYCVRHGNFGNSYISYWAYWGQGTLVTVSS |
| | | | | GGGGSGGGGSGGGGSQTVVTQEPSLTVSPGGTVTLTCGSSTGAVTSGN |
| | | | | YPNWVQQKPGQAPRGLIGGTKFLAPGTPARFSGSLLGGKAALTLSGVQ |
| | | | | PEDEAEYYCVLWYSNRWVFGGGTKLTVL |
| 332. | CD20 82-D2 CC x | arti- | aa | EVQLLESGGGLVQPGGSLRLSCAASGFTFSGHAMTWVRQAPGKCLEW |
| | CD22 53-G9 CC x | ficial | | LSTIYGSGGYTYYAGSVKGRFTISRDNSKNTLYLQMNSLRAEDTAVYY |
| | I2C clipopt | | | CAKVGGYDWYFDLWGRGTLVTVSSGGGGQGGGGQGGGGQSYELTQ |
| | | | | PPSVSVALGQTARITCGGHNIGSKNVHWYQQKPGQAPVLVIYRDTNRP |
| | | | | SGIPERFSGSNSGNTATLTISRAQAGDEADYYCQLWDSTTVVFGCGTK |
| | | | | LTVLSGGGGQQVQLVQSGAEVKKPGESLKISCKGSGYSFTSYGISWVR |
| | | | | QAPGQCLEWMGWISAYNGNTIYAQKLQGRVTMTTDTSTSTAYMELR |
| | | | | RLRSDDTAVYYCARDPGVTGDDYWGQGTLVTVSSGGGGQGGGGQG |
| | | | | GGGQEIVLTQSPATLSVSPGERATLSCRASLSVSSNLAWYQQKPGQAP |
| | | | | RLLIYGASTRATGIPARFSGSGSGTEFTLTISSLQSEDFAVYFCQQYHSW |
| | | | | PALTFGCGTKVEIKSGGGGQEVQLVESGGGLVQPGGSLKLSCAASGFT |
| | | | | FNKYAMNWVRQAPGKGLEWVARIRSKYNNYATYYADSVKDRFTISR |
| | | | | DDSKNTAYLQMNNLKTEDTAVYYCVRHGNFGNSYISYWAYWGQGTL |
| | | | | VTVSSGGGGQGGGGQGGGGQQTVVTQEPSLTVSPGGTVTLTCGSSTG |
| | | | | AVTSGNYPNWVQQKPGQAPRGLIGGTKFLAPGTPARFSGSLLGGKAAL |
| | | | | TLSGVQPEDEAEYYCVLWYSNRWVFGGGTKLTVL |
| 333. | CD20 82-D2 CC x | arti- | aa | EVQLLESGGGLVQPGGSLRLSCAASGFTFSGHAMTWVRQAPGKCLEW |
| | CD22 53-G9 CC x | ficial | | LSTIYGSGGYTYYAGSVKGRFTISRDNSKNTLYLQMNSLRAEDTAVYY |
| | I2E | | | CAKVGGYDWYFDLWGRGTLVTVSSGGGGSGGGGSGGGGSSYELTQP |
| | | | | PSVSVALGQTARITCGGHNIGSKNVHWYQQKPGQAPVLVIYRDTNRPS |
| | | | | GIPERFSGSNSGNTATLTISRAQAGDEADYYCQLWDSTTVVFGCGTKL |
| | | | | TVLSGGGGSQVQLVQSGAEVKKPGESLKISCKGSGYSFTSYGISWVRQ |
| | | | | APGQCLEWMGWISAYNGNTIYAQKLQGRVTMTTDTSTSTAYMELRRL |
| | | | | RSDDTAVYYCARDPGVTGDDYWGQGTLVTVSSGGGGSGGGGSGGGG |
| | | | | SEIVLTQSPATLSVSPGERATLSCRASLSVSSNLAWYQQKPGQAPRLLIY |
| | | | | GASTRATGIPARFSGSGSGTEFTLTISSLQSEDFAVYFCQQYHSWPALTF |
| | | | | GCGTKVEIKSGGGGSEVQLVESGGGLVQPGGSLKLSCAASGFTFNKYA |
| | | | | INWVRQAPGKGLEWVARIRSKYNNYATYYADAVKDRFTISRDDSKNT |
| | | | | VYLQMNNLKTEDTAVYYCARAGNFGSSYISYWAYWGQGTLVTVSSG |
| | | | | GGGSGGGGSGGGGSQTVVTQEPSLTVSPGGTVTITCGSSTGAVTSGNY |
| | | | | PNWVQKKPGQAPRGLIGGTKFLAPGTPARFSGSLSGGKAALTLSGVQP |
| | | | | EDEAEYYCVLWYSNRWVFGSGTKLTVL |
| 334. | CD20 82-D2 CC x | arti- | aa | EVQLLESGGGLVQPGGSLRLSCAASGFTFSGHAMTWVRQAPGKCLEW |
| | CD22 53-G9 CC x | ficial | | LSTIYGSGGYTYYAGSVKGRFTISRDNSKNTLYLQMNSLRAEDTAVYY |
| | I2E clipopt | | | CAKVGGYDWYFDLWGRGTLVTVSSGGGGQGGGGQGGGGQSYELTQ |
| | | | | PPSVSVALGQTARITCGGHNIGSKNVHWYQQKPGQAPVLVIYRDTNRP |
| | | | | SGIPERFSGSNSGNTATLTISRAQAGDEADYYCQLWDSTTVVFGCGTK |
| | | | | LTVLSGGGGQQVQLVQSGAEVKKPGESLKISCKGSGYSFTSYGISWVR |
| | | | | QAPGQCLEWMGWISAYNGNTIYAQKLQGRVTMTTDTSTSTAYMELR |
| | | | | RLRSDDTAVYYCARDPGVTGDDYWGQGTLVTVSSGGGGQGGGGQG |
| | | | | GGGQEIVLTQSPATLSVSPGERATLSCRASLSVSSNLAWYQQKPGQAP |
| | | | | RLLIYGASTRATGIPARFSGSGSGTEFTLTISSLQSEDFAVYFCQQYHSW |
| | | | | PALTFGCGTKVEIKSGGGGQEVQLVESGGGLVQPGGSLKLSCAASGFT |
| | | | | FNKYAINWVRQAPGKGLEWVARIRSKYNNYATYYADAVKDRFTISRD |
| | | | | DSKNTVYLQMNNLKTEDTAVYYCARAGNFGSSYISYWAYWGQGTLV |
| | | | | TVSSGGGGQGGGGQGGGGQQTVVTQEPSLTVSPGGTVTITCGSSTGAV |
| | | | | TSGNYPNWVQKKPGQAPRGLIGGTKFLAPGTPARFSGSLSGGKAALTL |
| | | | | SGVQPEDEAEYYCVLWYSNRWVFGSGTKLTVL |
| 335. | CD20 82-D2 CC x | arti- | aa | EVQLLESGGGLVQPGGSLRLSCAASGFTFSGHAMTWVRQAPGKCLEW |
| | CD22 53-G9 CC x | ficial | | LSTIYGSGGYTYYAGSVKGRFTISRDNSKNTLYLQMNSLRAEDTAVYY |
| | I2C x scFc | | | CAKVGGYDWYFDLWGRGTLVTVSSGGGGGGGGSGGGGSSYELTQP |
| | | | | PSVSVALGQTARITCGGHNIGSKNVHWYQQKPGQAPVLVIYRDTNRPS |
| | | | | GIPERFSGSNSGNTATLTISRAQAGDEADYYCQLWDSTTVVFGCGTKL |
| | | | | TVLSGGGGSQVQLVQSGAEVKKPGESLKISCKGSGYSFTSYGISWVRQ |
| | | | | APGQCLEWMGWISAYNGNTIYAQKLQGRVTMTTDTSTSTAYMELRRL |
| | | | | RSDDTAVYYCARDPGVTGDDYWGQGTLVTVSSGGGGSGGGGSGGGG |
| | | | | SEIVLTQSPATLSVSPGERATLSCRASLSVSSNLAWYQQKPGQAPRLLIY |
| | | | | GASTRATGIPARFSGSGSGTEFTLTISSLQSEDFAVYFCQQYHSWPALTF |
| | | | | GCGTKVEIKSGGGGSEVQLVESGGGLVQPGGSLKLSCAASGFTFNKYA |
| | | | | MNWVRQAPGKGLEWVARIRSKYNNYATYYADSVKDRFTISRDDSKN |
| | | | | TAYLQMNNLKTEDTAVYYCVRHGNFGNSYISYWAYWGQGTLVTVSS |
| | | | | GGGGSGGGGSGGGGSQTVVTQEPSLTVSPGGTVTLTCGSSTGAVTSGN |
| | | | | YPNWVQQKPGQAPRGLIGGTKFLAPGTPARFSGSLLGGKAALTLSGVQ |
| | | | | PEDEAEYYCVLWYSNRWVFGGGTKLTVLGGGGDKTHTCPPCPAPELL |
| | | | | GGPSVFLFPPKPKDTLMISRTPEVTCVVVDVSHEDPEVKFNWYVDGVE |
| | | | | VHNAKTKPCEEQYGSTYRCVSVLTVLHQDWLNGKEYKCKVSNKALP |
| | | | | APIEKTISKAKGQPREPQVYTLPPSREEMTKNQVSLTCLVKGFYPSDIA |
| | | | | VEWESNGQPENNYKTTPPVLDSDGSFFLYSKLTVDKSRWQQGNVFSCS |
| | | | | VMHEALHNHYTQKSLSLSPGKGGGGGGGGSGGGGSGGGGSGGGGS |
| | | | | GGGGSDKTHTCPPCPAPELLGGPSVFLFPPKPKDTLMISRTPEVTCVVV |
| | | | | DVSHEDPEVKFNWYVDGVEVHNAKTKPCEEQYGSTYRCVSVLTVLH |
| | | | | QDWLNGKEYKCKVSNKALPAPIEKTISKAKGQPREPQVYTLPPSREEM |
| | | | | TKNQVSLTCLVKGFYPSDIAVEWESNGQPENNYKTTPPVLDSDGSFFL |
| | | | | YSKLTVDKSRWQQGNVFSCSVMHEALHNHYTQKSLSLSPGK |
| 336. | CD20 82-D2 CC x | arti- | aa | EVQLLESGGGLVQPGGSLRLSCAASGFTFSGHAMTWVRQAPGKCLEW |
| | CD22 53-G9 CC x | ficial | | LSTIYGSGGYTYYAGSVKGRFTISRDNSKNTLYLQMNSLRAEDTAVYY |
| | I2C x scFc | | | CAKVGGYDWYFDLWGRGTLVTVSSGGGGQGGGGQGGGGQSYELTQ |
| | clipopt | | | PPSVSVALGQTARITCGGHNIGSKNVHWYQQKPGQAPVLVIYRDTNRP |
| | | | | SGIPERFSGSNSGNTATLTISRAQAGDEADYYCQLWDSTTVVFGCGTK |
| | | | | LTVLSGGGGQQVQLVQSGAEVKKPGESLKISCKGSGYSFTSYGISWVR |
| | | | | QAPGQCLEWMGWISAYNGNTIYAQKLQGRVTMTTDTSTSTAYMELR |
| | | | | RLRSDDTAVYYCARDPGVTGDDYWGQGTLVTVSSGGGGQGGGGQG |
| | | | | GGGQEIVLTQSPATLSVSPGERATLSCRASLSVSSNLAWYQQKPGQAP |
| | | | | RLLIYGASTRATGIPARFSGSGSGTEFTLTISSLQSEDFAVYFCQQYHSW |
| | | | | PALTFGCGTKVEIKSGGGGQEVQLVESGGGLVQPGGSLKLSCAASGFT |
| | | | | FNKYAMNWVRQAPGKGLEWVARIRSKYNNYATYYADSVKDRFTISR |
| | | | | DDSKNTAYLQMNNLKTEDTAVYYCVRHGNFGNSYISYWAYWGQGTL |
| | | | | VTVSSGGGGQGGGGQGGGGQQTVVTQEPSLTVSPGGTVTLTCGSSTG |
| | | | | AVTSGNYPNWVQQKPGQAPRGLIGGTKFLAPGTPARFSGSLLGGKAAL |
| | | | | TLSGVQPEDEAEYYCVLWYSNRWVFGGGTKLTVLGGGGCPPCPAPEL |
| | | | | LGGPSVFLFPPKPKDTLMISRTPEVTCVVVDVSHEEPEVKFNWYVDGV |
| | | | | EVHNAKTKPCEEQYGSTYRCVSVLTVLHQDWLNGKEYKCKVSNKAL |
| | | | | PAPIEKTISKAKGQPREPQVYTLPPSREEMTKNQVSLTCLVKGFYPSDIA |
| | | | | VEWESNGQPENNYKTTPPVLDSDGSFFLYSKLTVDKSRWQQGNVFSCS |
| | | | | VMHEALHNHYTQKSLSLSPGKGGGGQGGGGQGGGGQGGGGQGGGG |
| | | | | QGGGGQCPPCPAPELLGGPSVFLFPPKPKDTLMISRTPEVTCVVVDVSH |
| | | | | EEPEVKFNWYVDGVEVHNAKTKPCEEQYGSTYRCVSVLTVLHQDWL |
| | | | | NGKEYKCKVSNKALPAPIEKTISKAKGQPREPQVYTLPPSREEMTKNQ |
| | | | | VSLTCLVKGFYPSDIAVEWESNGQPENNYKTTPPVLDSDGSFFLYSKLT |
| | | | | VDKSRWQQGNVFSCSVMHEALHNHYTQKSLSLSPGK |
| 337. | CD20 82-D2 CC x | arti- | aa | EVQLLESGGGLVQPGGSLRLSCAASGFTFSGHAMTWVRQAPGKCLEW |
| | CD22 53-G9 CC x | ficial | | LSTIYGSGGYTYYAGSVKGRFTISRDNSKNTLYLQMNSLRAEDTAVYY |
| | I2E x scFc | | | CAKVGGYDWYFDLWGRGTLVTVSSGGGGSGGGGSGGGGSSYELTQP |
| | | | | PSVSVALGQTARITCGGHNIGSKNVHWYQQKPGQAPVLVIYRDTNRPS |
| | | | | GIPERFSGSNSGNTATLTISRAQAGDEADYYCQLWDSTTVVFGCGTKL |
| | | | | TVLSGGGGSQVQLVQSGAEVKKPGESLKISCKGSGYSFTSYGISWVRQ |
| | | | | APGQCLEWMGWISAYNGNTIYAQKLQGRVTMTTDTSTSTAYMELRRL |
| | | | | RSDDTAVYYCARDPGVTGDDYWGQGTLVTVSSGGGGSGGGGSGGGG |
| | | | | SEIVLTQSPATLSVSPGERATLSCRASLSVSSNLAWYQQKPGQAPRLLIY |
| | | | | GASTRATGIPARFSGSGSGTEFTLTISSLQSEDFAVYFCQQYHSWPALTF |
| | | | | GCGTKVEIKSGGGGSEVQLVESGGGLVQPGGSLKLSCAASGFTFNKYA |
| | | | | INWVRQAPGKGLEWVARIRSKYNNYATYYADAVKDRFTISRDDSKNT |
| | | | | VYLQMNNLKTEDTAVYYCARAGNFGSSYISYWAYWGQGTLVTVSSG |
| | | | | GGGSGGGGSGGGGSQTVVTQEPSLTVSPGGTVTITCGSSTGAVTSGNY |
| | | | | PNWVQKKPGQAPRGLIGGTKFLAPGTPARFSGSLSGGKAALTLSGVQP |
| | | | | EDEAEYYCVLWYSNRWVFGSGTKLTVLGGGGDKTHTCPPCPAPELLG |
| | | | | GPSVFLFPPKPKDTLMISRTPEVTCVVVDVSHEDPEVKFNWYVDGVEV |
| | | | | HNAKTKPCEEQYGSTYRCVSVLTVLHQDWLNGKEYKCKVSNKALPAP |
| | | | | IEKTISKAKGQPREPQVYTLPPSREEMTKNQVSLTCLVKGFYPSDIAVE |
| | | | | WESNGQPENNYKTTPPVLDSDGSFFLYSKLTVDKSRWQQGNVFSCSV |
| | | | | MHEALHNHYTQKSLSLSPGKGGGGSGGGGSGGGGSGGGGSGGGGSG |
| | | | | GGGSDKTHTCPPCPAPELLGGPSVFLFPPKPKDTLMISRTPEVTCVVVD |
| | | | | VSHEDPEVKFNWYVDGVEVHNAKTKPCEEQYGSTYRCVSVLTVLHQ |
| | | | | DWLNGKEYKCKVSNKALPAPIEKTISKAKGQPREPQVYTLPPSREEMT |
| | | | | KNQVSLTCLVKGFYPSDIAVEWESNGQPENNYKTTPPVLDSDGSFFLY |
| | | | | SKLTVDKSRWQQGNVFSCSVMHEALHNHYTQKSLSLSPGK |
| 338. | CD20 82-D2 CC x | arti- | aa | EVQLLESGGGLVQPGGSLRLSCAASGFTFSGHAMTWVRQAPGKCLEW |
| | CD22 53-G9 CC x | ficial | | LSTIYGSGGYTYYAGSVKGRFTISRDNSKNTLYLQMNSLRAEDTAVYY |
| | I2E x scFc | | | CAKVGGYDWYFDLWGRGTLVTVSSGGGGQGGGGQGGGGQSYELTQ |
| | clipopt | | | PPSVSVALGQTARITCGGHNIGSKNVHWYQQKPGQAPVLVIYRDTNRP |
| | | | | SGIPERFSGSNSGNTATLTISRAQAGDEADYYCQLWDSTTVVFGCGTK |
| | | | | LTVLSGGGGQQVQLVQSGAEVKKPGESLKISCKGSGYSFTSYGISWVR |
| | | | | QAPGQCLEWMGWISAYNGNTIYAQKLQGRVTMTTDTSTSTAYMELR |
| | | | | RLRSDDTAVYYCARDPGVTGDDYWGQGTLVTVSSGGGGQGGGGQG |
| | | | | GGGQEIVLTQSPATLSVSPGERATLSCRASLSVSSNLAWYQQKPGQAP |
| | | | | RLLIYGASTRATGIPARFSGSGSGTEFTLTISSLQSEDFAVYFCQQYHSW |
| | | | | PALTFGCGTKVEIKSGGGGQEVQLVESGGGLVQPGGSLKLSCAASGFT |
| | | | | FNKYAINWVRQAPGKGLEWVARIRSKYNNYATYYADAVKDRFTISRD |
| | | | | DSKNTVYLQMNNLKTEDTAVYYCARAGNFGSSYISYWAYWGQGTLV |
| | | | | TVSSGGGGQGGGGQGGGGQQTVVTQEPSLTVSPGGTVTITCGSSTGAV |
| | | | | TSGNYPNWVQKKPGQAPRGLIGGTKFLAPGTPARFSGSLSGGKAALTL |
| | | | | SGVQPEDEAEYYCVLWYSNRWVFGSGTKLTVLGGGGCPPCPAPELLG |
| | | | | GPSVFLFPPKPKDTLMISRTPEVTCVVVDVSHEEPEVKFNWYVDGVEV |
| | | | | HNAKTKPCEEQYGSTYRCVSVLTVLHQDWLNGKEYKCKVSNKALPAP |
| | | | | IEKTISKAKGQPREPQVYTLPPSREEMTKNQVSLTCLVKGFYPSDIAVE |
| | | | | WESNGQPENNYKTTPPVLDSDGSFFLYSKLTVDKSRWQQGNVFSCSV |
| | | | | MHEALHNHYTQKSLSLSPGKGGGGQGGGGQGGGGQGGGGQGGGGQ |
| | | | | GGGGQCPPCPAPELLGGPSVFLFPPKPKDTLMISRTPEVTCVVVDVSHE |
| | | | | EPEVKFNWYVDGVEVHNAKTKPCEEQYGSTYRCVSVLTVLHQDWLN |
| | | | | GKEYKCKVSNKALPAPIEKTISKAKGQPREPQVYTLPPSREEMTKNQVS |
| | | | | LTCLVKGFYPSDIAVEWESNGQPENNYKTTPPVLDSDGSFFLYSKLTVD |
| | | | | KSRWQQGNVFSCSVMHEALHNHYTQKSLSLSPGK |
| 339. | CD20 82-E2 CC x | arti- | aa | EVQLVESGGGLVQPGGSLTLSCAASGFTFHDYTMHWVRQTPGKCLEW |
| | CD22 43-F7 CC | ficial | | LSGIGWNGYSKGYADSVKGRFTISRDNAKNSLFLQMNSLTSDDTALYY |
| | | | | CVKDYHYGSGILDNYYGLDVWGQGTTVTVSSGGGGSGGGGSGGGGS |
| | | | | EIVLTQSPATLSVSPGERATLSCRASQSISNNLAWYQQKPGQAPRLLIY |
| | | | | GASSRATGIPDRFSGSGSGTEFTLTISSLQSEDFAVYYCQQYKNWPLTF |
| | | | | GCGTKVDIKSGGGGSQVQLVQSGGEVKKPGASVKVSCKASGYTFTSY |
| | | | | GISWVRQAPGQCLEWMGWISPQTGNAIYAQKLQGRVTMTRDTSTSTA |
| | | | | YMELRSLRSDDTAVYYCARDPDYYGSGSYSDYWGQGTLVTVSSGGG |
| | | | | GSGGGGSGGGGSEIVLTQSPATLSVSPGERATLSCRASQSVSSNLAWY |
| | | | | QQKPGQAPRLLIYGASSRATGIPARFSGSGSGTEFTLTISSLQSEDFAVY |
| | | | | YCQQYHSWPLLTFGCGTKVEIK |
| 340. | CD20 82-E2 CC x | arti- | aa | EVQLVESGGGLVQPGGSLTLSCAASGFTFHDYTMHWVRQTPGKCLEW |
| | CD22 43-F7 CC | ficial | | LSGIGWNGYSKGYADSVKGRFTISRDNAKNSLFLQMNSLTSDDTALYY |
| | clipopt | | | CVKDYHYGSGILDNYYGLDVWGQGTTVTVSSGGGGQGGGGQGGGG |
| | | | | QEIVLTQSPATLSVSPGERATLSCRASQSISNNLAWYQQKPGQAPRLLI |
| | | | | YGASSRATGIPDRFSGSGSGTEFTLTISSLQSEDFAVYYCQQYKNWPLT |
| | | | | FGCGTKVDIKSGGGGQQVQLVQSGGEVKKPGASVKVSCKASGYTFTS |
| | | | | YGISWVRQAPGQCLEWMGWISPQTGNAIYAQKLQGRVTMTRDTSTST |
| | | | | AYMELRSLRSDDTAVYYCARDPDYYGSGSYSDYWGQGTLVTVSSGG |
| | | | | GGQGGGGQGGGGQEIVLTQSPATLSVSPGERATLSCRASQSVSSNLAW |
| | | | | YQQKPGQAPRLLIYGASSRATGIPARFSGSGSGTEFTLTISSLQSEDFAV |
| | | | | YYCQQYHSWPLLTFGCGTKVEIK |
| 341. | CD20 82-E2 CC x | arti- | aa | EVQLVESGGGLVQPGGSLTLSCAASGFTFHDYTMHWVRQTPGKCLEW |
| | CD22 43-F7 CC x | ficial | | LSGIGWNGYSKGYADSVKGRFTISRDNAKNSLFLQMNSLTSDDTALYY |
| | I2C | | | CVKDYHYGSGILDNYYGLDVWGQGTTVTVSSGGGGSGGGGSGGGGS |
| | | | | EIVLTQSPATLSVSPGERATLSCRASQSISNNLAWYQQKPGQAPRLLIY |
| | | | | GASSRATGIPDRFSGSGSGTEFTLTISSLQSEDFAVYYCQQYKNWPLTF |
| | | | | GCGTKVDIKSGGGGSQVQLVQSGGEVKKPGASVKVSCKASGYTFTSY |
| | | | | GISWVRQAPGQCLEWMGWISPQTGNAIYAQKLQGRVTMTRDTSTSTA |
| | | | | YMELRSLRSDDTAVYYCARDPDYYGSGSYSDYWGQGTLVTVSSGGG |
| | | | | GSGGGGSGGGGSEIVLTQSPATLSVSPGERATLSCRASQSVSSNLAWY |
| | | | | QQKPGQAPRLLIYGASSRATGIPARFSGSGSGTEFTLTISSLQSEDFAVY |
| | | | | YCQQYHSWPLLTFGCGTKVEIKSGGGGSEVQLVESGGGLVQPGGSLKL |
| | | | | SCAASGFTFNKYAMNWVRQAPGKGLEWVARIRSKYNNYATYYADSV |
| | | | | KDRFTISRDDSKNTAYLQMNNLKTEDTAVYYCVRHGNFGNSYISYWA |
| | | | | YWGQGTLVTVSSGGGGSGGGGSGGGGSQTVVTQEPSLTVSPGGTVTL |
| | | | | TCGSSTGAVTSGNYPNWVQQKPGQAPRGLIGGTKFLAPGTPARFSGSL |
| | | | | LGGKAALTLSGVQPEDEAEYYCVLWYSNRWVFGGGTKLTVL |
| 342. | CD20 82-E2 CC x | arti- | aa | EVQLVESGGGLVQPGGSLTLSCAASGFTFHDYTMHWVRQTPGKCLEW |
| | CD22 43-F7 CC x | ficial | | LSGIGWNGYSKGYADSVKGRFTISRDNAKNSLFLQMNSLTSDDTALYY |
| | I2C clipopt | | | CVKDYHYGSGILDNYYGLDVWGQGTTVTVSSGGGGQGGGGQGGGG |
| | | | | QEIVLTQSPATLSVSPGERATLSCRASQSISNNLAWYQQKPGQAPRLLI |
| | | | | YGASSRATGIPDRFSGSGSGTEFTLTISSLQSEDFAVYYCQQYKNWPLT |
| | | | | FGCGTKVDIKSGGGGQQVQLVQSGGEVKKPGASVKVSCKASGYTFTS |
| | | | | YGISWVRQAPGQCLEWMGWISPQTGNAIYAQKLQGRVTMTRDTSTST |
| | | | | AYMELRSLRSDDTAVYYCARDPDYYGSGSYSDYWGQGTLVTVSSGG |
| | | | | GGQGGGGQGGGGQEIVLTQSPATLSVSPGERATLSCRASQSVSSNLAW |
| | | | | YQQKPGQAPRLLIYGASSRATGIPARFSGSGSGTEFTLTISSLQSEDFAV |
| | | | | YYCQQYHSWPLLTFGCGTKVEIKSGGGGQEVQLVESGGGLVQPGGSL |
| | | | | KLSCAASGFTFNKYAMNWVRQAPGKGLEWVARIRSKYNNYATYYAD |
| | | | | SVKDRFTISRDDSKNTAYLQMNNLKTEDTAVYYCVRHGNFGNSYISY |
| | | | | WAYWGQGTLVTVSSGGGGQGGGGQGGGGQQTVVTQEPSLTVSPGGT |
| | | | | VTLTCGSSTGAVTSGNYPNWVQQKPGQAPRGLIGGTKFLAPGTPARFS |
| | | | | GSLLGGKAALTLSGVQPEDEAEYYCVLWYSNRWVFGGGTKLTVL |
| 343. | CD20 82-E2 CC x | arti- | aa | EVQLVESGGGLVQPGGSLTLSCAASGFTFHDYTMHWVRQTPGKCLEW |
| | CD22 43-F7 CC x | ficial | | LSGIGWNGYSKGYADSVKGRFTISRDNAKNSLFLQMNSLTSDDTALYY |
| | I2E | | | CVKDYHYGSGILDNYYGLDVWGQGTTVTVSSGGGGSGGGGSGGGGS |
| | | | | EIVLTQSPATLSVSPGERATLSCRASQSISNNLAWYQQKPGQAPRLLIY |
| | | | | GASSRATGIPDRFSGSGSGTEFTLTISSLQSEDFAVYYCQQYKNWPLTF |
| | | | | GCGTKVDIKSGGGGSQVQLVQSGGEVKKPGASVKVSCKASGYTFTSY |
| | | | | GISWVRQAPGQCLEWMGWISPQTGNAIYAQKLQGRVTMTRDTSTSTA |
| | | | | YMELRSLRSDDTAVYYCARDPDYYGSGSYSDYWGQGTLVTVSSGGG |
| | | | | GSGGGGSGGGGSEIVLTQSPATLSVSPGERATLSCRASQSVSSNLAWY |
| | | | | QQKPGQAPRLLIYGASSRATGIPARFSGSGSGTEFTLTISSLQSEDFAVY |
| | | | | YCQQYHSWPLLTFGCGTKVEIKSGGGGSEVQLVESGGGLVQPGGSLKL |
| | | | | SCAASGFTFNKYAINWVRQAPGKGLEWVARIRSKYNNYATYYADAV |
| | | | | KDRFTISRDDSKNTVYLQMNNLKTEDTAVYYCARAGNFGSSYISYWA |
| | | | | YWGQGTLVTVSSGGGGSGGGGSGGGGSQTVVTQEPSLTVSPGGTVTIT |
| | | | | CGSSTGAVTSGNYPNWVQKKPGQAPRGLIGGTKFLAPGTPARFSGSLS |
| | | | | GGKAALTLSGVQPEDEAEYYCVLWYSNRWVFGSGTKLTVL |
| 344. | CD20 82-E2 CC x | arti- | aa | EVQLVESGGGLVQPGGSLTLSCAASGFTFHDYTMHWVRQTPGKCLEW |
| | CD22 43-F7 CC x | ficial | | LSGIGWNGYSKGYADSVKGRFTISRDNAKNSLFLQMNSLTSDDTALYY |
| | I2E clipopt | | | CVKDYHYGSGILDNYYGLDVWGQGTTVTVSSGGGGQGGGGQGGGG |
| | | | | QEIVLTQSPATLSVSPGERATLSCRASQSISNNLAWYQQKPGQAPRLLI |
| | | | | YGASSRATGIPDRFSGSGSGTEFTLTISSLQSEDFAVYYCQQYKNWPLT |
| | | | | FGCGTKVDIKSGGGGQQVQLVQSGGEVKKPGASVKVSCKASGYTFTS |
| | | | | YGISWVRQAPGQCLEWMGWISPQTGNAIYAQKLQGRVTMTRDTSTST |
| | | | | AYMELRSLRSDDTAVYYCARDPDYYGSGSYSDYWGQGTLVTVSSGG |
| | | | | GGQGGGGQGGGGQEIVLTQSPATLSVSPGERATLSCRASQSVSSNLAW |
| | | | | YQQKPGQAPRLLIYGASSRATGIPARFSGSGSGTEFTLTISSLQSEDFAV |
| | | | | YYCQQYHSWPLLTFGCGTKVEIKSGGGGQEVQLVESGGGLVQPGGSL |
| | | | | KLSCAASGFTFNKYAINWVRQAPGKGLEWVARIRSKYNNYATYYADA |
| | | | | VKDRFTISRDDSKNTVYLQMNNLKTEDTAVYYCARAGNFGSSYISYW |
| | | | | AYWGQGTLVTVSSGGGGQGGGGQGGGGQQTVVTQEPSLTVSPGGTV |
| | | | | TITCGSSTGAVTSGNYPNWVQKKPGQAPRGLIGGTKFLAPGTPARFSGS |
| | | | | LSGGKAALTLSGVQPEDEAEYYCVLWYSNRWVFGSGTKLTVL |
| 345. | CD20 82-E2 CC x | arti- | aa | EVQLVESGGGLVQPGGSLTLSCAASGFTFHDYTMHWVRQTPGKCLEW |
| | CD22 43-F7 CC x | ficial | | LSGIGWNGYSKGYADSVKGRFTISRDNAKNSLFLQMNSLTSDDTALYY |
| | I2C x scFc | | | CVKDYHYGSGILDNYYGLDVWGQGTTVTVSSGGGGSGGGGSGGGGS |
| | | | | EIVLTQSPATLSVSPGERATLSCRASQSISNNLAWYQQKPGQAPRLLIY |
| | | | | GASSRATGIPDRFSGSGSGTEFTLTISSLQSEDFAVYYCQQYKNWPLTF |
| | | | | GCGTKVDIKSGGGGSQVQLVQSGGEVKKPGASVKVSCKASGYTFTSY |
| | | | | GISWVRQAPGQCLEWMGWISPQTGNAIYAQKLQGRVTMTRDTSTSTA |
| | | | | YMELRSLRSDDTAVYYCARDPDYYGSGSYSDYWGQGTLVTVSSGGG |
| | | | | GSGGGGSGGGGSEIVLTQSPATLSVSPGERATLSCRASQSVSSNLAWY |
| | | | | QQKPGQAPRLLIYGASSRATGIPARFSGSGSGTEFTLTISSLQSEDFAVY |
| | | | | YCQQYHSWPLLTFGCGTKVEIKSGGGGSEVQLVESGGGLVQPGGSLKL |
| | | | | SCAASGFTFNKYAMNWVRQAPGKGLEWVARIRSKYNNYATYYADSV |
| | | | | KDRFTISRDDSKNTAYLQMNNLKTEDTAVYYCVRHGNFGNSYISYWA |
| | | | | YWGQGTLVTVSSGGGGSGGGGSGGGGSQTVVTQEPSLTVSPGGTVTL |
| | | | | TCGSSTGAVTSGNYPNWVQQKPGQAPRGLIGGTKFLAPGTPARFSGSL |
| | | | | LGGKAALTLSGVQPEDEAEYYCVLWYSNRWVFGGGTKLTVLGGGGD |
| | | | | KTHTCPPCPAPELLGGPSVFLFPPKPKDTLMISRTPEVTCVVVDVSHEDP |
| | | | | EVKFNWYVDGVEVHNAKTKPCEEQYGSTYRCVSVLTVLHQDWLNGK |
| | | | | EYKCKVSNKALPAPIEKTISKAKGQPREPQVYTLPPSREEMTKNQVSLT |
| | | | | CLVKGFYPSDIAVEWESNGQPENNYKTTPPVLDSDGSFFLYSKLTVDK |
| | | | | SRWQQGNVFSCSVMHEALHNHYTQKSLSLSPGKGGGGSGGGGSGGG |
| | | | | GSGGGGSGGGGSGGGGSDKTHTCPPCPAPELLGGPSVFLFPPKPKDTL |
| | | | | MISRTPEVTCVVVDVSHEDPEVKFNWYVDGVEVHNAKTKPCEEQYGS |
| | | | | TYRCVSVLTVLHQDWLNGKEYKCKVSNKALPAPIEKTISKAKGQPREP |
| | | | | QVYTLPPSREEMTKNQVSLTCLVKGFYPSDIAVEWESNGQPENNYKTT |
| | | | | PPVLDSDGSFFLYSKLTVDKSRWQQGNVFSCSVMHEALHNHYTQKSL |
| | | | | SLSPGK |
| 346. | CD20 82-E2 CC x | arti- | aa | EVQLVESGGGLVQPGGSLTLSCAASGFTFHDYTMHWVRQTPGKCLEW |
| | CD22 43-F7 CC x | ficial | | LSGIGWNGYSKGYADSVKGRFTISRDNAKNSLFLQMNSLTSDDTALYY |
| | I2C x scFc | | | CVKDYHYGSGILDNYYGLDVWGQGTTVTVSSGGGGQGGGGQGGGG |
| | clipopt | | | QEIVLTQSPATLSVSPGERATLSCRASQSISNNLAWYQQKPGQAPRLLI |
| | | | | YGASSRATGIPDRFSGSGSGTEFTLTISSLQSEDFAVYYCQQYKNWPLT |
| | | | | FGCGTKVDIKSGGGGQQVQLVQSGGEVKKPGASVKVSCKASGYTFTS |
| | | | | YGISWVRQAPGQCLEWMGWISPQTGNAIYAQKLQGRVTMTRDTSTST |
| | | | | AYMELRSLRSDDTAVYYCARDPDYYGSGSYSDYWGQGTLVTVSSGG |
| | | | | GGQGGGGQGGGGQEIVLTQSPATLSVSPGERATLSCRASQSVSSNLAW |
| | | | | YQQKPGQAPRLLIYGASSRATGIPARFSGSGSGTEFTLTISSLQSEDFAV |
| | | | | YYCQQYHSWPLLTFGCGTKVEIKSGGGGQEVQLVESGGGLVQPGGSL |
| | | | | KLSCAASGFTFNKYAMNWVRQAPGKGLEWVARIRSKYNNYATYYAD |
| | | | | SVKDRFTISRDDSKNTAYLQMNNLKTEDTAVYYCVRHGNFGNSYISY |
| | | | | WAYWGQGTLVTVSSGGGGQGGGGQGGGGQQTVVTQEPSLTVSPGGT |
| | | | | VTLTCGSSTGAVTSGNYPNWVQQKPGQAPRGLIGGTKFLAPGTPARFS |
| | | | | GSLLGGKAALTLSGVQPEDEAEYYCVLWYSNRWVFGGGTKLTVLGG |
| | | | | GGCPPCPAPELLGGPSVFLFPPKPKDTLMISRTPEVTCVVVDVSHEEPEV |
| | | | | KFNWYVDGVEVHNAKTKPCEEQYGSTYRCVSVLTVLHQDWLNGKEY |
| | | | | KCKVSNKALPAPIEKTISKAKGQPREPQVYTLPPSREEMTKNQVSLTCL |
| | | | | VKGFYPSDIAVEWESNGQPENNYKTTPPVLDSDGSFFLYSKLTVDKSR |
| | | | | WQQGNVFSCSVMHEALHNHYTQKSLSLSPGKGGGGQGGGGQGGGGQ |
| | | | | GGGGQGGGGQGGGGQCPPCPAPELLGGPSVFLFPPKPKDTLMISRTPE |
| | | | | VTCVVVDVSHEEPEVKFNWYVDGVEVHNAKTKPCEEQYGSTYRCVS |
| | | | | VLTVLHQDWLNGKEYKCKVSNKALPAPIEKTISKAKGQPREPQVYTLP |
| | | | | PSREEMTKNQVSLTCLVKGFYPSDIAVEWESNGQPENNYKTTPPVLDS |
| | | | | DGSFFLYSKLTVDKSRWQQGNVFSCSVMHEALHNHYTQKSLSLSPGK |
| 347. | CD20 82-E2 CC x | arti- | aa | EVQLVESGGGLVQPGGSLTLSCAASGFTFHDYTMHWVRQTPGKCLEW |
| | CD22 43-F7 CC x | ficial | | LSGIGWNGYSKGYADSVKGRFTISRDNAKNSLFLQMNSLTSDDTALYY |
| | I2E x scFc | | | CVKDYHYGSGILDNYYGLDVWGQGTTVTVSSGGGGSGGGGSGGGGS |
| | | | | EIVLTQSPATLSVSPGERATLSCRASQSISNNLAWYQQKPGQAPRLLIY |
| | | | | GASSRATGIPDRFSGSGSGTEFTLTISSLQSEDFAVYYCQQYKNWPLTF |
| | | | | GCGTKVDIKSGGGGSQVQLVQSGGEVKKPGASVKVSCKASGYTFTSY |
| | | | | GISWVRQAPGQCLEWMGWISPQTGNAIYAQKLQGRVTMTRDTSTSTA |
| | | | | YMELRSLRSDDTAVYYCARDPDYYGSGSYSDYWGQGTLVTVSSGGG |
| | | | | GSGGGGSGGGGSEIVLTQSPATLSVSPGERATLSCRASQSVSSNLAWY |
| | | | | QQKPGQAPRLLIYGASSRATGIPARFSGSGSGTEFTLTISSLQSEDFAVY |
| | | | | YCQQYHSWPLLTFGCGTKVEIKSGGGGSEVQLVESGGGLVQPGGSLKL |
| | | | | SCAASGFTFNKYAINWVRQAPGKGLEWVARIRSKYNNYATYYADAV |
| | | | | KDRFTISRDDSKNTVYLQMNNLKTEDTAVYYCARAGNFGSSYISYWA |
| | | | | YWGQGTLVTVSSGGGGSGGGGSGGGGSQTVVTQEPSLTVSPGGTVTIT |
| | | | | CGSSTGAVTSGNYPNWVQKKPGQAPRGLIGGTKFLAPGTPARFSGSLS |
| | | | | GGKAALTLSGVQPEDEAEYYCVLWYSNRWVFGSGTKLTVLGGGGDK |
| | | | | THTCPPCPAPELLGGPSVFLFPPKPKDTLMISRTPEVTCVVVDVSHEDPE |
| | | | | VKFNWYVDGVEVHNAKTKPCEEQYGSTYRCVSVLTVLHQDWLNGKE |
| | | | | YKCKVSNKALPAPIEKTISKAKGQPREPQVYTLPPSREEMTKNQVSLTC |
| | | | | LVKGFYPSDIAVEWESNGQPENNYKTTPPVLDSDGSFFLYSKLTVDKS |
| | | | | RWQQGNVFSCSVMHEALHNHYTQKSLSLSPGKGGGGSGGGGSGGGG |
| | | | | SGGGGSGGGGSGGGGSDKTHTCPPCPAPELLGGPSVFLFPPKPKDTLMI |
| | | | | SRTPEVTCVVVDVSHEDPEVKFNWYVDGVEVHNAKTKPCEEQYGSTY |
| | | | | RCVSVLTVLHQDWLNGKEYKCKVSNKALPAPIEKTISKAKGQPREPQV |
| | | | | YTLPPSREEMTKNQVSLTCLVKGFYPSDIAVEWESNGQPENNYKTTPP |
| | | | | VLDSDGSFFLYSKLTVDKSRWQQGNVFSCSVMHEALHNHYTQKSLSL |
| | | | | SPGK |
| 348. | CD20 82-E2 CC x | arti- | aa | EVQLVESGGGLVQPGGSLTLSCAASGFTFHDYTMHWVRQTPGKCLEW |
| | CD22 43-F7 CC x | ficial | | LSGIGWNGYSKGYADSVKGRFTISRDNAKNSLFLQMNSLTSDDTALYY |
| | I2E x scFc | | | CVKDYHYGSGILDNYYGLDVWGQGTTVTVSSGGGGQGGGGQGGGG |
| | clipopt | | | QEIVLTQSPATLSVSPGERATLSCRASQSISNNLAWYQQKPGQAPRLLI |
| | | | | YGASSRATGIPDRFSGSGSGTEFTLTISSLQSEDFAVYYCQQYKNWPLT |
| | | | | FGCGTKVDIKSGGGGQQVQLVQSGGEVKKPGASVKVSCKASGYTFTS |
| | | | | YGISWVRQAPGQCLEWMGWISPQTGNAIYAQKLQGRVTMTRDTSTST |
| | | | | AYMELRSLRSDDTAVYYCARDPDYYGSGSYSDYWGQGTLVTVSSGG |
| | | | | GGQGGGGQGGGGQEIVLTQSPATLSVSPGERATLSCRASQSVSSNLAW |
| | | | | YQQKPGQAPRLLIYGASSRATGIPARFSGSGSGTEFTLTISSLQSEDFAV |
| | | | | YYCQQYHSWPLLTFGCGTKVEIKSGGGGQEVQLVESGGGLVQPGGSL |
| | | | | KLSCAASGFTFNKYAINWVRQAPGKGLEWVARIRSKYNNYATYYADA |
| | | | | VKDRFTISRDDSKNTVYLQMNNLKTEDTAVYYCARAGNFGSSYISYW |
| | | | | AYWGQGTLVTVSSGGGGQGGGGQGGGGQQTVVTQEPSLTVSPGGTV |
| | | | | TITCGSSTGAVTSGNYPNWVQKKPGQAPRGLIGGTKFLAPGTPARFSGS |
| | | | | LSGGKAALTLSGVQPEDEAEYYCVLWYSNRWVFGSGTKLTVLGGGG |
| | | | | CPPCPAPELLGGPSVFLFPPKPKDTLMISRTPEVTCVVVDVSHEEPEVKF |
| | | | | NWYVDGVEVHNAKTKPCEEQYGSTYRCVSVLTVLHQDWLNGKEYKC |
| | | | | KVSNKALPAPIEKTISKAKGQPREPQVYTLPPSREEMTKNQVSLTCLVK |
| | | | | GFYPSDIAVEWESNGQPENNYKTTPPVLDSDGSFFLYSKLTVDKSRWQ |
| | | | | QGNVFSCSVMHEALHNHYTQKSLSLSPGKGGGGQGGGGQGGGGQGG |
| | | | | GGQGGGGQGGGGQCPPCPAPELLGGPSVFLFPPKPKDTLMISRTPEVTC |
| | | | | VVVDVSHEEPEVKFNWYVDGVEVHNAKTKPCEEQYGSTYRCVSVLT |
| | | | | VLHQDWLNGKEYKCKVSNKALPAPIEKTISKAKGQPREPQVYTLPPSR |
| | | | | EEMTKNQVSLTCLVKGFYPSDIAVEWESNGQPENNYKTTPPVLDSDGS |
| | | | | FFLYSKLTVDKSRWQQGNVFSCSVMHEALHNHYTQKSLSLSPGK |
| 349. | CD20 82-G2 CC x | arti- | aa | EVQLVESGGGLVQPGRSLRLSCAASGFTFHDYTMHWVRQAPGKCLEW |
| | CD22 43-F7 CC | ficial | | VSGISWNTGTIGYADSVKGRFTISRDNAKNSLYLQMNSLRAEDTALYY |
| | | | | CVKDAFYGGDYYYNYGMDVWGHGTTVTVSSGGGGSGGGGSGGGGS |
| | | | | EIVLTQSPATLSVSPGERATLSCRASQSVNNNLAWYQQKPGQAPRLLIY |
| | | | | GASTRATGIPARFSGSGSGTDFTLTISSLQSDDFAVYYCQQYNNWPLTF |
| | | | | GCGTKVEIKSGGGGSQVQLVQSGGEVKKPGASVKVSCKASGYTFTSY |
| | | | | GISWVRQAPGQCLEWMGWISPQTGNAIYAQKLQGRVTMTRDTSTSTA |
| | | | | YMELRSLRSDDTAVYYCARDPDYYGSGSYSDYWGQGTLVTVSSGGG |
| | | | | GSGGGGSGGGGSEIVLTQSPATLSVSPGERATLSCRASQSVSSNLAWY |
| | | | | QQKPGQAPRLLIYGASSRATGIPARFSGSGSGTEFTLTISSLQSEDFAVY |
| | | | | YCQQYHSWPLLTFGCGTKVEIK |
| 350. | CD20 82-G2 CC x | arti- | aa | EVQLVESGGGLVQPGRSLRLSCAASGFTFHDYTMHWVRQAPGKCLEW |
| | CD22 43-F7 CC | ficial | | VSGISWNTGTIGYADSVKGRFTISRDNAKNSLYLQMNSLRAEDTALYY |
| | clipopt | | | CVKDAFYGGDYYYNYGMDVWGHGTTVTVSSGGGGQGGGGQGGGG |
| | | | | QEIVLTQSPATLSVSPGERATLSCRASQSVNNNLAWYQQKPGQAPRLLI |
| | | | | YGASTRATGIPARFSGSGSGTDFTLTISSLQSDDFAVYYCQQYNNWPLT |
| | | | | FGCGTKVEIKSGGGGQQVQLVQSGGEVKKPGASVKVSCKASGYTFTS |
| | | | | YGISWVRQAPGQCLEWMGWISPQTGNAIYAQKLQGRVTMTRDTSTST |
| | | | | AYMELRSLRSDDTAVYYCARDPDYYGSGSYSDYWGQGTLVTVSSGG |
| | | | | GGQGGGGQGGGGQEIVLTQSPATLSVSPGERATLSCRASQSVSSNLAW |
| | | | | YQQKPGQAPRLLIYGASSRATGIPARFSGSGSGTEFTLTISSLQSEDFAV |
| | | | | YYCQQYHSWPLLTFGCGTKVEIK |
| 351. | CD20 82-G2 CC x | arti- | aa | EVQLVESGGGLVQPGRSLRLSCAASGFTFHDYTMHWVRQAPGKCLEW |
| | CD22 43-F7 CC x | ficial | | VSGISWNTGTIGYADSVKGRFTISRDNAKNSLYLQMNSLRAEDTALYY |
| | I2C | | | CVKDAFYGGDYYYNYGMDVWGHGTTVTVSSGGGGSGGGGSGGGGS |
| | | | | EIVLTQSPATLSVSPGERATLSCRASQSVNNNLAWYQQKPGQAPRLLIY |
| | | | | GASTRATGIPARFSGSGSGTDFTLTISSLQSDDFAVYYCQQYNNWPLTF |
| | | | | GCGTKVEIKSGGGGSQVQLVQSGGEVKKPGASVKVSCKASGYTFTSY |
| | | | | GISWVRQAPGQCLEWMGWISPQTGNAIYAQKLQGRVTMTRDTSTSTA |
| | | | | YMELRSLRSDDTAVYYCARDPDYYGSGSYSDYWGQGTLVTVSSGGG |
| | | | | GSGGGGSGGGGSEIVLTQSPATLSVSPGERATLSCRASQSVSSNLAWY |
| | | | | QQKPGQAPRLLIYGASSRATGIPARFSGSGSGTEFTLTISSLQSEDFAVY |
| | | | | YCQQYHSWPLLTFGCGTKVEIKSGGGGSEVQLVESGGGLVQPGGSLKL |
| | | | | SCAASGFTFNKYAMNWVRQAPGKGLEWVARIRSKYNNYATYYADSV |
| | | | | KDRFTISRDDSKNTAYLQMNNLKTEDTAVYYCVRHGNFGNSYISYWA |
| | | | | YWGQGTLVTVSSGGGGSGGGGSGGGGSQTVVTQEPSLTVSPGGTVTL |
| | | | | TCGSSTGAVTSGNYPNWVQQKPGQAPRGLIGGTKFLAPGTPARFSGSL |
| | | | | LGGKAALTLSGVQPEDEAEYYCVLWYSNRWVFGGGTKLTVL |
| 352. | CD20 82-G2 CC x | arti- | aa | EVQLVESGGGLVQPGRSLRLSCAASGFTFHDYTMHWVRQAPGKCLEW |
| | CD22 43-F7 CC x | ficial | | VSGISWNTGTIGYADSVKGRFTISRDNAKNSLYLQMNSLRAEDTALYY |
| | I2C clipopt | | | CVKDAFYGGDYYYNYGMDVWGHGTTVTVSSGGGGQGGGGQGGGG |
| | | | | QEIVLTQSPATLSVSPGERATLSCRASQSVNNNLAWYQQKPGQAPRLLI |
| | | | | YGASTRATGIPARFSGSGSGTDFTLTISSLQSDDFAVYYCQQYNNWPLT |
| | | | | FGCGTKVEIKSGGGGQQVQLVQSGGEVKKPGASVKVSCKASGYTFTS |
| | | | | YGISWVRQAPGQCLEWMGWISPQTGNAIYAQKLQGRVTMTRDTSTST |
| | | | | AYMELRSLRSDDTAVYYCARDPDYYGSGSYSDYWGQGTLVTVSSGG |
| | | | | GGQGGGGQGGGGQEIVLTQSPATLSVSPGERATLSCRASQSVSSNLAW |
| | | | | YQQKPGQAPRLLIYGASSRATGIPARFSGSGSGTEFTLTISSLQSEDFAV |
| | | | | YYCQQYHSWPLLTFGCGTKVEIKSGGGGQEVQLVESGGGLVQPGGSL |
| | | | | KLSCAASGFTFNKYAMNWVRQAPGKGLEWVARIRSKYNNYATYYAD |
| | | | | SVKDRFTISRDDSKNTAYLQMNNLKTEDTAVYYCVRHGNFGNSYISY |
| | | | | WAYWGQGTLVTVSSGGGGQGGGGQGGGGQQTVVTQEPSLTVSPGGT |
| | | | | VTLTCGSSTGAVTSGNYPNWVQQKPGQAPRGLIGGTKFLAPGTPARFS |
| | | | | GSLLGGKAALTLSGVQPEDEAEYYCVLWYSNRWVFGGGTKLTVL |
| 353. | CD20 82-G2 CC x | arti- | aa | EVQLVESGGGLVQPGRSLRLSCAASGFTFHDYTMHWVRQAPGKCLEW |
| | CD22 43-F7 CC x | ficial | | VSGISWNTGTIGYADSVKGRFTISRDNAKNSLYLQMNSLRAEDTALYY |
| | I2E | | | CVKDAFYGGDYYYNYGMDVWGHGTTVTVSSGGGGSGGGGSGGGGS |
| | | | | EIVLTQSPATLSVSPGERATLSCRASQSVNNNLAWYQQKPGQAPRLLIY |
| | | | | GASTRATGIPARFSGSGSGTDFTLTISSLQSDDFAVYYCQQYNNWPLTF |
| | | | | GCGTKVEIKSGGGGSQVQLVQSGGEVKKPGASVKVSCKASGYTFTSY |
| | | | | GISWVRQAPGQCLEWMGWISPQTGNAIYAQKLQGRVTMTRDTSTSTA |
| | | | | YMELRSLRSDDTAVYYCARDPDYYGSGSYSDYWGQGTLVTVSSGGG |
| | | | | GSGGGGSGGGGSEIVLTQSPATLSVSPGERATLSCRASQSVSSNLAWY |
| | | | | QQKPGQAPRLLIYGASSRATGIPARFSGSGSGTEFTLTISSLQSEDFAVY |
| | | | | YCQQYHSWPLLTFGCGTKVEIKSGGGGSEVQLVESGGGLVQPGGSLKL |
| | | | | SCAASGFTFNKYAINWVRQAPGKGLEWVARIRSKYNNYATYYADAV |
| | | | | KDRFTISRDDSKNTVYLQMNNLKTEDTAVYYCARAGNFGSSYISYWA |
| | | | | YWGQGTLVTVSSGGGGSGGGGSGGGGSQTVVTQEPSLTVSPGGTVTIT |
| | | | | CGSSTGAVTSGNYPNWVQKKPGQAPRGLIGGTKFLAPGTPARFSGSLS |
| | | | | GGKAALTLSGVQPEDEAEYYCVLWYSNRWVFGSGTKLTVL |
| 354. | CD20 82-G2 CC x | arti- | aa | EVQLVESGGGLVQPGRSLRLSCAASGFTFHDYTMHWVRQAPGKCLEW |
| | CD22 43-F7 CC x | ficial | | VSGISWNTGTIGYADSVKGRFTISRDNAKNSLYLQMNSLRAEDTALYY |
| | I2E clipopt | | | CVKDAFYGGDYYYNYGMDVWGHGTTVTVSSGGGGQGGGGQGGGG |
| | | | | QEIVLTQSPATLSVSPGERATLSCRASQSVNNNLAWYQQKPGQAPRLLI |
| | | | | YGASTRATGIPARFSGSGSGTDFTLTISSLQSDDFAVYYCQQYNNWPLT |
| | | | | FGCGTKVEIKSGGGGQQVQLVQSGGEVKKPGASVKVSCKASGYTFTS |
| | | | | YGISWVRQAPGQCLEWMGWISPQTGNAIYAQKLQGRVTMTRDTSTST |
| | | | | AYMELRSLRSDDTAVYYCARDPDYYGSGSYSDYWGQGTLVTVSSGG |
| | | | | GGQGGGGQGGGGQEIVLTQSPATLSVSPGERATLSCRASQSVSSNLAW |
| | | | | YQQKPGQAPRLLIYGASSRATGIPARFSGSGSGTEFTLTISSLQSEDFAV |
| | | | | YYCQQYHSWPLLTFGCGTKVEIKSGGGGQEVQLVESGGGLVQPGGSL |
| | | | | KLSCAASGFTFNKYAINWVRQAPGKGLEWVARIRSKYNNYATYYADA |
| | | | | VKDRFTISRDDSKNTVYLQMNNLKTEDTAVYYCARAGNFGSSYISYW |
| | | | | AYWGQGTLVTVSSGGGGQGGGGQGGGGQQTVVTQEPSLTVSPGGTV |
| | | | | TITCGSSTGAVTSGNYPNWVQKKPGQAPRGLIGGTKFLAPGTPARFSGS |
| | | | | LSGGKAALTLSGVQPEDEAEYYCVLWYSNRWVFGSGTKLTVL |
| 355. | CD20 82-G2 CC x | arti- | aa | EVQLVESGGGLVQPGRSLRLSCAASGFTFHDYTMHWVRQAPGKCLEW |
| | CD22 43-F7 CC x | ficial | | VSGISWNTGTIGYADSVKGRFTISRDNAKNSLYLQMNSLRAEDTALYY |
| | I2C x scFc | | | CVKDAFYGGDYYYNYGMDVWGHGTTVTVSSGGGGSGGGGSGGGGS |
| | | | | EIVLTQSPATLSVSPGERATLSCRASQSVNNNLAWYQQKPGQAPRLLIY |
| | | | | GASTRATGIPARFSGSGSGTDFTLTISSLQSDDFAVYYCQQYNNWPLTF |
| | | | | GCGTKVEIKSGGGGSQVQLVQSGGEVKKPGASVKVSCKASGYTFTSY |
| | | | | GISWVRQAPGQCLEWMGWISPQTGNAIYAQKLQGRVTMTRDTSTSTA |
| | | | | YMELRSLRSDDTAVYYCARDPDYYGSGSYSDYWGQGTLVTVSSGGG |
| | | | | GSGGGGSGGGGSEIVLTQSPATLSVSPGERATLSCRASQSVSSNLAWY |
| | | | | QQKPGQAPRLLIYGASSRATGIPARFSGSGSGTEFTLTISSLQSEDFAVY |
| | | | | YCQQYHSWPLLTFGCGTKVEIKSGGGGSEVQLVESGGGLVQPGGSLKL |
| | | | | SCAASGFTFNKYAMNWVRQAPGKGLEWVARIRSKYNNYATYYADSV |
| | | | | KDRFTISRDDSKNTAYLQMNNLKTEDTAVYYCVRHGNFGNSYISYWA |
| | | | | YWGQGTLVTVSSGGGGSGGGGSGGGGSQTVVTQEPSLTVSPGGTVTL |
| | | | | TCGSSTGAVTSGNYPNWVQQKPGQAPRGLIGGTKFLAPGTPARFSGSL |
| | | | | LGGKAALTLSGVQPEDEAEYYCVLWYSNRWVFGGGTKLTVLGGGGD |
| | | | | KTHTCPPCPAPELLGGPSVFLFPPKPKDTLMISRTPEVTCVVVDVSHEDP |
| | | | | EVKFNWYVDGVEVHNAKTKPCEEQYGSTYRCVSVLTVLHQDWLNGK |
| | | | | EYKCKVSNKALPAPIEKTISKAKGQPREPQVYTLPPSREEMTKNQVSLT |
| | | | | CLVKGFYPSDIAVEWESNGQPENNYKTTPPVLDSDGSFFLYSKLTVDK |
| | | | | SRWQQGNVFSCSVMHEALHNHYTQKSLSLSPGKGGGGSGGGGSGGG |
| | | | | GSGGGGSGGGGSGGGGSDKTHTCPPCPAPELLGGPSVFLFPPKPKDTL |
| | | | | MISRTPEVTCVVVDVSHEDPEVKFNWYVDGVEVHNAKTKPCEEQYGS |
| | | | | TYRCVSVLTVLHQDWLNGKEYKCKVSNKALPAPIEKTISKAKGQPREP |
| | | | | QVYTLPPSREEMTKNQVSLTCLVKGFYPSDIAVEWESNGQPENNYKTT |
| | | | | PPVLDSDGSFFLYSKLTVDKSRWQQGNVFSCSVMHEALHNHYTQKSL |
| | | | | SLSPGK |
| 356. | CD20 82-G2 CC x | artifi | aa | EVQLVESGGGLVQPGRSLRLSCAASGFTFHDYTMHWVRQAPGKCLEW |
| | CD22 43-F7 CC x | cial | | VSGISWNTGTIGYADSVKGRFTISRDNAKNSLYLQMNSLRAEDTALYY |
| | I2C x scFc | | | CVKDAFYGGDYYYNYGMDVWGHGTTVTVSSGGGGQGGGGQGGGG |
| | clipopt | | | QEIVLTQSPATLSVSPGERATLSCRASQSVNNNLAWYQQKPGQAPRLLI |
| | | | | YGASTRATGIPARFSGSGSGTDFTLTISSLQSDDFAVYYCQQYNNWPLT |
| | | | | FGCGTKVEIKSGGGGQQVQLVQSGGEVKKPGASVKVSCKASGYTFTS |
| | | | | YGISWVRQAPGQCLEWMGWISPQTGNAIYAQKLQGRVTMTRDTSTST |
| | | | | AYMELRSLRSDDTAVYYCARDPDYYGSGSYSDYWGQGTLVTVSSGG |
| | | | | GGQGGGGQGGGGQEIVLTQSPATLSVSPGERATLSCRASQSVSSNLAW |
| | | | | YQQKPGQAPRLLIYGASSRATGIPARFSGSGSGTEFTLTISSLQSEDFAV |
| | | | | YYCQQYHSWPLLTFGCGTKVEIKSGGGGQEVQLVESGGGLVQPGGSL |
| | | | | KLSCAASGFTFNKYAMNWVRQAPGKGLEWVARIRSKYNNYATYYAD |
| | | | | SVKDRFTISRDDSKNTAYLQMNNLKTEDTAVYYCVRHGNFGNSYISY |
| | | | | WAYWGQGTLVTVSSGGGGQGGGGQGGGGQQTVVTQEPSLTVSPGGT |
| | | | | VTLTCGSSTGAVTSGNYPNWVQQKPGQAPRGLIGGTKFLAPGTPARFS |
| | | | | GSLLGGKAALTLSGVQPEDEAEYYCVLWYSNRWVFGGGTKLTVLGG |
| | | | | GGCPPCPAPELLGGPSVFLFPPKPKDTLMISRTPEVTCVVVDVSHEEPEV |
| | | | | KFNWYVDGVEVHNAKTKPCEEQYGSTYRCVSVLTVLHQDWLNGKEY |
| | | | | KCKVSNKALPAPIEKTISKAKGQPREPQVYTLPPSREEMTKNQVSLTCL |
| | | | | VKGFYPSDIAVEWESNGQPENNYKTTPPVLDSDGSFFLYSKLTVDKSR |
| | | | | WQQGNVFSCSVMHEALHNHYTQKSLSLSPGKGGGGQGGGGQGGGGQ |
| | | | | GGGGQGGGGQGGGGQCPPCPAPELLGGPSVFLFPPKPKDTLMISRTPE |
| | | | | VTCVVVDVSHEEPEVKFNWYVDGVEVHNAKTKPCEEQYGSTYRCVS |
| | | | | VLTVLHQDWLNGKEYKCKVSNKALPAPIEKTISKAKGQPREPQVYTLP |
| | | | | PSREEMTKNQVSLTCLVKGFYPSDIAVEWESNGQPENNYKTTPPVLDS |
| | | | | DGSFFLYSKLTVDKSRWQQGNVFSCSVMHEALHNHYTQKSLSLSPGK |
| 357. | CD20 82-G2 CC x | arti- | aa | EVQLVESGGGLVQPGRSLRLSCAASGFTFHDYTMHWVRQAPGKCLEW |
| | CD22 43-F7 CC x | ficial | | VSGISWNTGTIGYADSVKGRFTISRDNAKNSLYLQMNSLRAEDTALYY |
| | I2E x scFc | | | CVKDAFYGGDYYYNYGMDVWGHGTTVTVSSGGGGSGGGGSGGGGS |
| | | | | EIVLTQSPATLSVSPGERATLSCRASQSVNNNLAWYQQKPGQAPRLLIY |
| | | | | GASTRATGIPARFSGSGSGTDFTLTISSLQSDDFAVYYCQQYNNWPLTF |
| | | | | GCGTKVEIKSGGGGSQVQLVQSGGEVKKPGASVKVSCKASGYTFTSY |
| | | | | GISWVRQAPGQCLEWMGWISPQTGNAIYAQKLQGRVTMTRDTSTSTA |
| | | | | YMELRSLRSDDTAVYYCARDPDYYGSGSYSDYWGQGTLVTVSSGGG |
| | | | | GSGGGGSGGGGSEIVLTQSPATLSVSPGERATLSCRASQSVSSNLAWY |
| | | | | QQKPGQAPRLLIYGASSRATGIPARFSGSGSGTEFTLTISSLQSEDFAVY |
| | | | | YCQQYHSWPLLTFGCGTKVEIKSGGGGSEVQLVESGGGLVQPGGSLKL |
| | | | | SCAASGFTFNKYAINWVRQAPGKGLEWVARIRSKYNNYATYYADAV |
| | | | | KDRFTISRDDSKNTVYLQMNNLKTEDTAVYYCARAGNFGSSYISYWA |
| | | | | YWGQGTLVTVSSGGGGSGGGGSGGGGSQTVVTQEPSLTVSPGGTVTIT |
| | | | | CGSSTGAVTSGNYPNWVQKKPGQAPRGLIGGTKFLAPGTPARFSGSLS |
| | | | | GGKAALTLSGVQPEDEAEYYCVLWYSNRWVFGSGTKLTVLGGGGDK |
| | | | | THTCPPCPAPELLGGPSVFLFPPKPKDTLMISRTPEVTCVVVDVSHEDPE |
| | | | | VKFNWYVDGVEVHNAKTKPCEEQYGSTYRCVSVLTVLHQDWLNGKE |
| | | | | YKCKVSNKALPAPIEKTISKAKGQPREPQVYTLPPSREEMTKNQVSLTC |
| | | | | LVKGFYPSDIAVEWESNGQPENNYKTTPPVLDSDGSFFLYSKLTVDKS |
| | | | | RWQQGNVFSCSVMHEALHNHYTQKSLSLSPGKGGGGSGGGGSGGGG |
| | | | | SGGGGSGGGGSGGGGSDKTHTCPPCPAPELLGGPSVFLFPPKPKDTLMI |
| | | | | SRTPEVTCVVVDVSHEDPEVKFNWYVDGVEVHNAKTKPCEEQYGSTY |
| | | | | RCVSVLTVLHQDWLNGKEYKCKVSNKALPAPIEKTISKAKGQPREPQV |
| | | | | YTLPPSREEMTKNQVSLTCLVKGFYPSDIAVEWESNGQPENNYKTTPP |
| | | | | VLDSDGSFFLYSKLTVDKSRWQQGNVFSCSVMHEALHNHYTQKSLSL |
| | | | | SPGK |
| 358. | CD20 82-G2 CC x | arti- | aa | EVQLVESGGGLVQPGRSLRLSCAASGFTFHDYTMHWVRQAPGKCLEW |
| | CD22 43-F7 CC x | ficial | | VSGISWNTGTIGYADSVKGRFTISRDNAKNSLYLQMNSLRAEDTALYY |
| | I2E x scFc | | | CVKDAFYGGDYYYNYGMDVWGHGTTVTVSSGGGGQGGGGQGGGG |
| | clipopt | | | QEIVLTQSPATLSVSPGERATLSCRASQSVNNNLAWYQQKPGQAPRLLI |
| | | | | YGASTRATGIPARFSGSGSGTDFTLTISSLQSDDFAVYYCQQYNNWPLT |
| | | | | FGCGTKVEIKSGGGGQQVQLVQSGGEVKKPGASVKVSCKASGYTFTS |
| | | | | YGISWVRQAPGQCLEWMGWISPQTGNAIYAQKLQGRVTMTRDTSTST |
| | | | | AYMELRSLRSDDTAVYYCARDPDYYGSGSYSDYWGQGTLVTVSSGG |
| | | | | GGQGGGGQGGGGQEIVLTQSPATLSVSPGERATLSCRASQSVSSNLAW |
| | | | | YQQKPGQAPRLLIYGASSRATGIPARFSGSGSGTEFTLTISSLQSEDFAV |
| | | | | YYCQQYHSWPLLTFGCGTKVEIKSGGGGQEVQLVESGGGLVQPGGSL |
| | | | | KLSCAASGFTFNKYAINWVRQAPGKGLEWVARIRSKYNNYATYYADA |
| | | | | VKDRFTISRDDSKNTVYLQMNNLKTEDTAVYYCARAGNFGSSYISYW |
| | | | | AYWGQGTLVTVSSGGGGQGGGGQGGGGQQTVVTQEPSLTVSPGGTV |
| | | | | TITCGSSTGAVTSGNYPNWVQKKPGQAPRGLIGGTKFLAPGTPARFSGS |
| | | | | LSGGKAALTLSGVQPEDEAEYYCVLWYSNRWVFGSGTKLTVLGGGG |
| | | | | CPPCPAPELLGGPSVFLFPPKPKDTLMISRTPEVTCVVVDVSHEEPEVKF |
| | | | | NWYVDGVEVHNAKTKPCEEQYGSTYRCVSVLTVLHQDWLNGKEYKC |
| | | | | KVSNKALPAPIEKTISKAKGQPREPQVYTLPPSREEMTKNQVSLTCLVK |
| | | | | GFYPSDIAVEWESNGQPENNYKTTPPVLDSDGSFFLYSKLTVDKSRWQ |
| | | | | QGNVFSCSVMHEALHNHYTQKSLSLSPGKGGGGQGGGGQGGGGQGG |
| | | | | GGQGGGGQGGGGQCPPCPAPELLGGPSVFLFPPKPKDTLMISRTPEVTC |
| | | | | VVVDVSHEEPEVKFNWYVDGVEVHNAKTKPCEEQYGSTYRCVSVLT |
| | | | | VLHQDWLNGKEYKCKVSNKALPAPIEKTISKAKGQPREPQVYTLPPSR |
| | | | | EEMTKNQVSLTCLVKGFYPSDIAVEWESNGQPENNYKTTPPVLDSDGS |
| | | | | FFLYSKLTVDKSRWQQGNVFSCSVMHEALHNHYTQKSLSLSPGK |
| 359. | CD20 82-G2 CC x | arti- | aa | EVQLVESGGGLVQPGRSLRLSCAASGFTFHDYTMHWVRQAPGKCLEW |
| | CD22 44-A8 CC | ficial | | VSGISWNTGTIGYADSVKGRFTISRDNAKNSLYLQMNSLRAEDTALYY |
| | | | | CVKDAFYGGDYYYNYGMDVWGHGTTVTVSSGGGGSGGGGSGGGGS |
| | | | | EIVLTQSPATLSVSPGERATLSCRASQSVNNNLAWYQQKPGQAPRLLIY |
| | | | | GASTRATGIPARFSGSGSGTDFTLTISSLQSDDFAVYYCQQYNNWPLTF |
| | | | | GCGTKVEIKSGGGGSQVQLVQSGAEVKKPGASVKVSCKASGYTFTSY |
| | | | | GISWVRQAPGQCLEWMGWISAYNGNAIYAQKLQGRVTMTRDTSTSTA |
| | | | | YMELRSLRSDDTAVYYCARDPDYYGSGSYSDYWGQGTLVTVSSGGG |
| | | | | GSGGGGSGGGGSEIVLTQSPATLSVSPGERATLSCRASQSVSSNLAWY |
| | | | | QQKPGQAPRLLIYGASSRATGIPARFSGSGSGTEFTLTISSLQSEDFAVY |
| | | | | YCQQYHSWPILHFGCGTKVEIK |
| 360. | CD20 82-G2 CC x | arti- | aa | EVQLVESGGGLVQPGRSLRLSCAASGFTFHDYTMHWVRQAPGKCLEW |
| | CD22 44-A8 CC | ficial | | VSGISWNTGTIGYADSVKGRFTISRDNAKNSLYLQMNSLRAEDTALYY |
| | clipopt | | | CVKDAFYGGDYYYNYGMDVWGHGTTVTVSSGGGGQGGGGQGGGG |
| | | | | QEIVLTQSPATLSVSPGERATLSCRASQSVNNNLAWYQQKPGQAPRLLI |
| | | | | YGASTRATGIPARFSGSGSGTDFTLTISSLQSDDFAVYYCQQYNNWPLT |
| | | | | FGCGTKVEIKSGGGGQQVQLVQSGAEVKKPGASVKVSCKASGYTFTS |
| | | | | YGISWVRQAPGQCLEWMGWISAYNGNAIYAQKLQGRVTMTRDTSTST |
| | | | | AYMELRSLRSDDTAVYYCARDPDYYGSGSYSDYWGQGTLVTVSSGG |
| | | | | GGQGGGGQGGGGQEIVLTQSPATLSVSPGERATLSCRASQSVSSNLAW |
| | | | | YQQKPGQAPRLLIYGASSRATGIPARFSGSGSGTEFTLTISSLQSEDFAV |
| | | | | YYCQQYHSWPILHFGCGTKVEIK |
| 361. | CD20 82-G2 CC x | arti- | aa | EVQLVESGGGLVQPGRSLRLSCAASGFTFHDYTMHWVRQAPGKCLEW |
| | CD22 44-A8 CC x | ficial | | VSGISWNTGTIGYADSVKGRFTISRDNAKNSLYLQMNSLRAEDTALYY |
| | I2C | | | CVKDAFYGGDYYYNYGMDVWGHGTTVTVSSGGGGSGGGGSGGGGS |
| | | | | EIVLTQSPATLSVSPGERATLSCRASQSVNNNLAWYQQKPGQAPRLLIY |
| | | | | GASTRATGIPARFSGSGSGTDFTLTISSLQSDDFAVYYCQQYNNWPLTF |
| | | | | GCGTKVEIKSGGGGSQVQLVQSGAEVKKPGASVKVSCKASGYTFTSY |
| | | | | GISWVRQAPGQCLEWMGWISAYNGNAIYAQKLQGRVTMTRDTSTSTA |
| | | | | YMELRSLRSDDTAVYYCARDPDYYGSGSYSDYWGQGTLVTVSSGGG |
| | | | | GSGGGGSGGGGSEIVLTQSPATLSVSPGERATLSCRASQSVSSNLAWY |
| | | | | QQKPGQAPRLLIYGASSRATGIPARFSGSGSGTEFTLTISSLQSEDFAVY |
| | | | | YCQQYHSWPILHFGCGTKVEIKSGGGGSEVQLVESGGGLVQPGGSLKL |
| | | | | SCAASGFTFNKYAMNWVRQAPGKGLEWVARIRSKYNNYATYYADSV |
| | | | | KDRFTISRDDSKNTAYLQMNNLKTEDTAVYYCVRHGNFGNSYISYWA |
| | | | | YWGQGTLVTVSSGGGGSGGGGSGGGGSQTVVTQEPSLTVSPGGTVTL |
| | | | | TCGSSTGAVTSGNYPNWVQQKPGQAPRGLIGGTKFLAPGTPARFSGSL |
| | | | | LGGKAALTLSGVQPEDEAEYYCVLWYSNRWVFGGGTKLTVL |
| 362. | CD20 82-G2 CC x | arti- | aa | EVQLVESGGGLVQPGRSLRLSCAASGFTFHDYTMHWVRQAPGKCLEW |
| | CD22 44-A8 CC x | ficial | | VSGISWNTGTIGYADSVKGRFTISRDNAKNSLYLQMNSLRAEDTALYY |
| | I2C clipopt | | | CVKDAFYGGDYYYNYGMDVWGHGTTVTVSSGGGGQGGGGQGGGG |
| | | | | QEIVLTQSPATLSVSPGERATLSCRASQSVNNNLAWYQQKPGQAPRLLI |
| | | | | YGASTRATGIPARFSGSGSGTDFTLTISSLQSDDFAVYYCQQYNNWPLT |
| | | | | FGCGTKVEIKSGGGGQQVQLVQSGAEVKKPGASVKVSCKASGYTFTS |
| | | | | YGISWVRQAPGQCLEWMGWISAYNGNAIYAQKLQGRVTMTRDTSTST |
| | | | | AYMELRSLRSDDTAVYYCARDPDYYGSGSYSDYWGQGTLVTVSSGG |
| | | | | GGQGGGGQGGGGQEIVLTQSPATLSVSPGERATLSCRASQSVSSNLAW |
| | | | | YQQKPGQAPRLLIYGASSRATGIPARFSGSGSGTEFTLTISSLQSEDFAV |
| | | | | YYCQQYHSWPILHFGCGTKVEIKSGGGGQEVQLVESGGGLVQPGGSL |
| | | | | KLSCAASGFTFNKYAMNWVRQAPGKGLEWVARIRSKYNNYATYYAD |
| | | | | SVKDRFTISRDDSKNTAYLQMNNLKTEDTAVYYCVRHGNFGNSYISY |
| | | | | WAYWGQGTLVTVSSGGGGQGGGGQGGGGQQTVVTQEPSLTVSPGGT |
| | | | | VTLTCGSSTGAVTSGNYPNWVQQKPGQAPRGLIGGTKFLAPGTPARFS |
| | | | | GSLLGGKAALTLSGVQPEDEAEYYCVLWYSNRWVFGGGTKLTVL |
| 363. | CD20 82-G2 CC x | arti- | aa | EVQLVESGGGLVQPGRSLRLSCAASGFTFHDYTMHWVRQAPGKCLEW |
| | CD22 44-A8 CC x | ficial | | VSGISWNTGTIGYADSVKGRFTISRDNAKNSLYLQMNSLRAEDTALYY |
| | I2E | | | CVKDAFYGGDYYYNYGMDVWGHGTTVTVSSGGGGSGGGGSGGGGS |
| | | | | EIVLTQSPATLSVSPGERATLSCRASQSVNNNLAWYQQKPGQAPRLLIY |
| | | | | GASTRATGIPARFSGSGSGTDFTLTISSLQSDDFAVYYCQQYNNWPLTF |
| | | | | GCGTKVEIKSGGGGSQVQLVQSGAEVKKPGASVKVSCKASGYTFTSY |
| | | | | GISWVRQAPGQCLEWMGWISAYNGNAIYAQKLQGRVTMTRDTSTSTA |
| | | | | YMELRSLRSDDTAVYYCARDPDYYGSGSYSDYWGQGTLVTVSSGGG |
| | | | | GSGGGGSGGGGSEIVLTQSPATLSVSPGERATLSCRASQSVSSNLAWY |
| | | | | QQKPGQAPRLLIYGASSRATGIPARFSGSGSGTEFTLTISSLQSEDFAVY |
| | | | | YCQQYHSWPILHFGCGTKVEIKSGGGGSEVQLVESGGGLVQPGGSLKL |
| | | | | SCAASGFTFNKYAINWVRQAPGKGLEWVARIRSKYNNYATYYADAV |
| | | | | KDRFTISRDDSKNTVYLQMNNLKTEDTAVYYCARAGNFGSSYISYWA |
| | | | | YWGQGTLVTVSSGGGGSGGGGSGGGGSQTVVTQEPSLTVSPGGTVTIT |
| | | | | CGSSTGAVTSGNYPNWVQKKPGQAPRGLIGGTKFLAPGTPARFSGSLS |
| | | | | GGKAALTLSGVQPEDEAEYYCVLWYSNRWVFGSGTKLTVL |
| 364. | CD20 82-G2 CC x | arti- | aa | EVQLVESGGGLVQPGRSLRLSCAASGFTFHDYTMHWVRQAPGKCLEW |
| | CD22 44-A8 CC x | ficial | | VSGISWNTGTIGYADSVKGRFTISRDNAKNSLYLQMNSLRAEDTALYY |
| | I2E clipopt | | | CVKDAFYGGDYYYNYGMDVWGHGTTVTVSSGGGGQGGGGQGGGG |
| | | | | QEIVLTQSPATLSVSPGERATLSCRASQSVNNNLAWYQQKPGQAPRLLI |
| | | | | YGASTRATGIPARFSGSGSGTDFTLTISSLQSDDFAVYYCQQYNNWPLT |
| | | | | FGCGTKVEIKSGGGGQQVQLVQSGAEVKKPGASVKVSCKASGYTFTS |
| | | | | YGISWVRQAPGQCLEWMGWISAYNGNAIYAQKLQGRVTMTRDTSTST |
| | | | | AYMELRSLRSDDTAVYYCARDPDYYGSGSYSDYWGQGTLVTVSSGG |
| | | | | GGQGGGGQGGGGQEIVLTQSPATLSVSPGERATLSCRASQSVSSNLAW |
| | | | | YQQKPGQAPRLLIYGASSRATGIPARFSGSGSGTEFTLTISSLQSEDFAV |
| | | | | YYCQQYHSWPILHFGCGTKVEIKSGGGGQEVQLVESGGGLVQPGGSL |
| | | | | KLSCAASGFTFNKYAINWVRQAPGKGLEWVARIRSKYNNYATYYADA |
| | | | | VKDRFTISRDDSKNTVYLQMNNLKTEDTAVYYCARAGNFGSSYISYW |
| | | | | AYWGQGTLVTVSSGGGGQGGGGQGGGGQQTVVTQEPSLTVSPGGTV |
| | | | | TITCGSSTGAVTSGNYPNWVQKKPGQAPRGLIGGTKFLAPGTPARFSGS |
| | | | | LSGGKAALTLSGVQPEDEAEYYCVLWYSNRWVFGSGTKLTVL |
| 365. | CD20 82-G2 CC x | arti- | aa | EVQLVESGGGLVQPGRSLRLSCAASGFTFHDYTMHWVRQAPGKCLEW |
| | CD22 44-A8 CC x | ficial | | VSGISWNTGTIGYADSVKGRFTISRDNAKNSLYLQMNSLRAEDTALYY |
| | I2C x scFc | | | CVKDAFYGGDYYYNYGMDVWGHGTTVTVSSGGGGSGGGGSGGGGS |
| | | | | EIVLTQSPATLSVSPGERATLSCRASQSVNNNLAWYQQKPGQAPRLLIY |
| | | | | GASTRATGIPARFSGSGSGTDFTLTISSLQSDDFAVYYCQQYNNWPLTF |
| | | | | GCGTKVEIKSGGGGSQVQLVQSGAEVKKPGASVKVSCKASGYTFTSY |
| | | | | GISWVRQAPGQCLEWMGWISAYNGNAIYAQKLQGRVTMTRDTSTSTA |
| | | | | YMELRSLRSDDTAVYYCARDPDYYGSGSYSDYWGQGTLVTVSSGGG |
| | | | | GSGGGGSGGGGSEIVLTQSPATLSVSPGERATLSCRASQSVSSNLAWY |
| | | | | QQKPGQAPRLLIYGASSRATGIPARFSGSGSGTEFTLTISSLQSEDFAVY |
| | | | | YCQQYHSWPILHFGCGTKVEIKSGGGGSEVQLVESGGGLVQPGGSLKL |
| | | | | SCAASGFTFNKYAMNWVRQAPGKGLEWVARIRSKYNNYATYYADSV |
| | | | | KDRFTISRDDSKNTAYLQMNNLKTEDTAVYYCVRHGNFGNSYISYWA |
| | | | | YWGQGTLVTVSSGGGGSGGGGSGGGGSQTVVTQEPSLTVSPGGTVTL |
| | | | | TCGSSTGAVTSGNYPNWVQQKPGQAPRGLIGGTKFLAPGTPARFSGSL |
| | | | | LGGKAALTLSGVQPEDEAEYYCVLWYSNRWVFGGGTKLTVLGGGGD |
| | | | | KTHTCPPCPAPELLGGPSVFLFPPKPKDTLMISRTPEVTCVVVDVSHEDP |
| | | | | EVKFNWYVDGVEVHNAKTKPCEEQYGSTYRCVSVLTVLHQDWLNGK |
| | | | | EYKCKVSNKALPAPIEKTISKAKGQPREPQVYTLPPSREEMTKNQVSLT |
| | | | | CLVKGFYPSDIAVEWESNGQPENNYKTTPPVLDSDGSFFLYSKLTVDK |
| | | | | SRWQQGNVFSCSVMHEALHNHYTQKSLSLSPGKGGGGSGGGGSGGG |
| | | | | GSGGGGSGGGGSGGGGSDKTHTCPPCPAPELLGGPSVFLFPPKPKDTL |
| | | | | MISRTPEVTCVVVDVSHEDPEVKFNWYVDGVEVHNAKTKPCEEQYGS |
| | | | | TYRCVSVLTVLHQDWLNGKEYKCKVSNKALPAPIEKTISKAKGQPREP |
| | | | | QVYTLPPSREEMTKNQVSLTCLVKGFYPSDIAVEWESNGQPENNYKTT |
| | | | | PPVLDSDGSFFLYSKLTVDKSRWQQGNVFSCSVMHEALHNHYTQKSL |
| | | | | SLSPGK |
| 366. | CD20 82-G2 CC x | arti- | aa | EVQLVESGGGLVQPGRSLRLSCAASGFTFHDYTMHWVRQAPGKCLEW |
| | CD22 44-A8 CC x | ficial | | VSGISWNTGTIGYADSVKGRFTISRDNAKNSLYLQMNSLRAEDTALYY |
| | I2C x scFc | | | CVKDAFYGGDYYYNYGMDVWGHGTTVTVSSGGGGQGGGGQGGGG |
| | clipopt | | | QEIVLTQSPATLSVSPGERATLSCRASQSVNNNLAWYQQKPGQAPRLLI |
| | | | | YGASTRATGIPARFSGSGSGTDFTLTISSLQSDDFAVYYCQQYNNWPLT |
| | | | | FGCGTKVEIKSGGGGQQVQLVQSGAEVKKPGASVKVSCKASGYTFTS |
| | | | | YGISWVRQAPGQCLEWMGWISAYNGNAIYAQKLQGRVTMTRDTSTST |
| | | | | AYMELRSLRSDDTAVYYCARDPDYYGSGSYSDYWGQGTLVTVSSGG |
| | | | | GGQGGGGQGGGGQEIVLTQSPATLSVSPGERATLSCRASQSVSSNLAW |
| | | | | YQQKPGQAPRLLIYGASSRATGIPARFSGSGSGTEFTLTISSLQSEDFAV |
| | | | | YYCQQYHSWPILHFGCGTKVEIKSGGGGQEVQLVESGGGLVQPGGSL |
| | | | | KLSCAASGFTFNKYAMNWVRQAPGKGLEWVARIRSKYNNYATYYAD |
| | | | | SVKDRFTISRDDSKNTAYLQMNNLKTEDTAVYYCVRHGNFGNSYISY |
| | | | | WAYWGQGTLVTVSSGGGGQGGGGQGGGGQQTVVTQEPSLTVSPGGT |
| | | | | VTLTCGSSTGAVTSGNYPNWVQQKPGQAPRGLIGGTKFLAPGTPARFS |
| | | | | GSLLGGKAALTLSGVQPEDEAEYYCVLWYSNRWVFGGGTKLTVLGG |
| | | | | GGCPPCPAPELLGGPSVFLFPPKPKDTLMISRTPEVTCVVVDVSHEEPEV |
| | | | | KFNWYVDGVEVHNAKTKPCEEQYGSTYRCVSVLTVLHQDWLNGKEY |
| | | | | KCKVSNKALPAPIEKTISKAKGQPREPQVYTLPPSREEMTKNQVSLTCL |
| | | | | VKGFYPSDIAVEWESNGQPENNYKTTPPVLDSDGSFFLYSKLTVDKSR |
| | | | | WQQGNVFSCSVMHEALHNHYTQKSLSLSPGKGGGGQGGGGQGGGGQ |
| | | | | GGGGQGGGGQGGGGQCPPCPAPELLGGPSVFLFPPKPKDTLMISRTPE |
| | | | | VTCVVVDVSHEEPEVKFNWYVDGVEVHNAKTKPCEEQYGSTYRCVS |
| | | | | VLTVLHQDWLNGKEYKCKVSNKALPAPIEKTISKAKGQPREPQVYTLP |
| | | | | PSREEMTKNQVSLTCLVKGFYPSDIAVEWESNGQPENNYKTTPPVLDS |
| | | | | DGSFFLYSKLTVDKSRWQQGNVFSCSVMHEALHNHYTQKSLSLSPGK |
| 367. | CD20 82-G2 CC x | arti- | aa | EVQLVESGGGLVQPGRSLRLSCAASGFTFHDYTMHWVRQAPGKCLEW |
| | CD22 44-A8 CC x | ficial | | VSGISWNTGTIGYADSVKGRFTISRDNAKNSLYLQMNSLRAEDTALYY |
| | I2E x scFc | | | CVKDAFYGGDYYYNYGMDVWGHGTTVTVSSGGGGSGGGGGGGGS |
| | | | | EIVLTQSPATLSVSPGERATLSCRASQSVNNNLAWYQQKPGQAPRLLIY |
| | | | | GASTRATGIPARFSGSGSGTDFTLTISSLQSDDFAVYYCQQYNNWPLTF |
| | | | | GCGTKVEIKSGGGGSQVQLVQSGAEVKKPGASVKVSCKASGYTFTSY |
| | | | | GISWVRQAPGQCLEWMGWISAYNGNAIYAQKLQGRVTMTRDTSTSTA |
| | | | | YMELRSLRSDDTAVYYCARDPDYYGSGSYSDYWGQGTLVTVSSGGG |
| | | | | GSGGGGSGGGGSEIVLTQSPATLSVSPGERATLSCRASQSVSSNLAWY |
| | | | | QQKPGQAPRLLIYGASSRATGIPARFSGSGSGTEFTLTISSLQSEDFAVY |
| | | | | YCQQYHSWPILHFGCGTKVEIKSGGGGSEVQLVESGGGLVQPGGSLKL |
| | | | | SCAASGFTFNKYAINWVRQAPGKGLEWVARIRSKYNNYATYYADAV |
| | | | | KDRFTISRDDSKNTVYLQMNNLKTEDTAVYYCARAGNFGSSYISYWA |
| | | | | YWGQGTLVTVSSGGGGSGGGGSGGGGSQTVVTQEPSLTVSPGGTVTIT |
| | | | | CGSSTGAVTSGNYPNWVQKKPGQAPRGLIGGTKFLAPGTPARFSGSLS |
| | | | | GGKAALTLSGVQPEDEAEYYCVLWYSNRWVFGSGTKLTVLGGGGDK |
| | | | | THTCPPCPAPELLGGPSVFLFPPKPKDTLMISRTPEVTCVVVDVSHEDPE |
| | | | | VKFNWYVDGVEVHNAKTKPCEEQYGSTYRCVSVLTVLHQDWLNGKE |
| | | | | YKCKVSNKALPAPIEKTISKAKGQPREPQVYTLPPSREEMTKNQVSLTC |
| | | | | LVKGFYPSDIAVEWESNGQPENNYKTTPPVLDSDGSFFLYSKLTVDKS |
| | | | | RWQQGNVFSCSVMHEALHNHYTQKSLSLSPGKGGGGSGGGGSGGGG |
| | | | | SGGGGSGGGGSGGGGSDKTHTCPPCPAPELLGGPSVFLFPPKPKDTLMI |
| | | | | SRTPEVTCVVVDVSHEDPEVKFNWYVDGVEVHNAKTKPCEEQYGSTY |
| | | | | RCVSVLTVLHQDWLNGKEYKCKVSNKALPAPIEKTISKAKGQPREPQV |
| | | | | YTLPPSREEMTKNQVSLTCLVKGFYPSDIAVEWESNGQPENNYKTTPP |
| | | | | VLDSDGSFFLYSKLTVDKSRWQQGNVFSCSVMHEALHNHYTQKSLSL |
| | | | | SPGK |
| 368. | CD20 82-G2 CC x | arti- | aa | EVQLVESGGGLVQPGRSLRLSCAASGFTFHDYTMHWVRQAPGKCLEW |
| | CD22 44-A8 CC x | ficial | | VSGISWNTGTIGYADSVKGRFTISRDNAKNSLYLQMNSLRAEDTALYY |
| | I2E x scFc | | | CVKDAFYGGDYYYNYGMDVWGHGTTVTVSSGGGGQGGGGQGGGG |
| | clipopt | | | QEIVLTQSPATLSVSPGERATLSCRASQSVNNNLAWYQQKPGQAPRLLI |
| | | | | YGASTRATGIPARFSGSGSGTDFTLTISSLQSDDFAVYYCQQYNNWPLT |
| | | | | FGCGTKVEIKSGGGGQQVQLVQSGAEVKKPGASVKVSCKASGYTFTS |
| | | | | YGISWVRQAPGQCLEWMGWISAYNGNAIYAQKLQGRVTMTRDTSTST |
| | | | | AYMELRSLRSDDTAVYYCARDPDYYGSGSYSDYWGQGTLVTVSSGG |
| | | | | GGQGGGGQGGGGQEIVLTQSPATLSVSPGERATLSCRASQSVSSNLAW |
| | | | | YQQKPGQAPRLLIYGASSRATGIPARFSGSGSGTEFTLTISSLQSEDFAV |
| | | | | YYCQQYHSWPILHFGCGTKVEIKSGGGGQEVQLVESGGGLVQPGGSL |
| | | | | KLSCAASGFTFNKYAINWVRQAPGKGLEWVARIRSKYNNYATYYADA |
| | | | | VKDRFTISRDDSKNTVYLQMNNLKTEDTAVYYCARAGNFGSSYISYW |
| | | | | AYWGQGTLVTVSSGGGGQGGGGQGGGGQQTVVTQEPSLTVSPGGTV |
| | | | | TITCGSSTGAVTSGNYPNWVQKKPGQAPRGLIGGTKFLAPGTPARFSGS |
| | | | | LSGGKAALTLSGVQPEDEAEYYCVLWYSNRWVFGSGTKLTVLGGGG |
| | | | | CPPCPAPELLGGPSVFLFPPKPKDTLMISRTPEVTCVVVDVSHEEPEVKF |
| | | | | NWYVDGVEVHNAKTKPCEEQYGSTYRCVSVLTVLHQDWLNGKEYKC |
| | | | | KVSNKALPAPIEKTISKAKGQPREPQVYTLPPSREEMTKNQVSLTCLVK |
| | | | | GFYPSDIAVEWESNGQPENNYKTTPPVLDSDGSFFLYSKLTVDKSRWQ |
| | | | | QGNVFSCSVMHEALHNHYTQKSLSLSPGKGGGGQGGGGQGGGGQGG |
| | | | | GGQGGGGQGGGGQCPPCPAPELLGGPSVFLFPPKPKDTLMISRTPEVTC |
| | | | | VVVDVSHEEPEVKFNWYVDGVEVHNAKTKPCEEQYGSTYRCVSVLT |
| | | | | VLHQDWLNGKEYKCKVSNKALPAPIEKTISKAKGQPREPQVYTLPPSR |
| | | | | EEMTKNQVSLTCLVKGFYPSDIAVEWESNGQPENNYKTTPPVLDSDGS |
| | | | | FFLYSKLTVDKSRWQQGNVFSCSVMHEALHNHYTQKSLSLSPGK |
| 369. | CD20 82-G2 CC x | arti- | aa | EVQLVESGGGLVQPGRSLRLSCAASGFTFHDYTMHWVRQAPGKCLEW |
| | CD22 53-D6 CC | ficial | | VSGISWNTGTIGYADSVKGRFTISRDNAKNSLYLQMNSLRAEDTALYY |
| | | | | CVKDAFYGGDYYYNYGMDVWGHGTTVTVSSGGGGSGGGGSGGGGS |
| | | | | EIVLTQSPATLSVSPGERATLSCRASQSVNNNLAWYQQKPGQAPRLLIY |
| | | | | GASTRATGIPARFSGSGSGTDFTLTISSLQSDDFAVYYCQQYNNWPLTF |
| | | | | GCGTKVEIKSGGGGSQVQLVQSGAEVKKPGASVKVSCKASGYSFTSY |
| | | | | GITWVRQAPGQCLEWMGWISAYNGNTIYAQKLQGRVTMTTDTSTSTA |
| | | | | YMELRSLRSDDTAVYYCVRDSNHEDFWGQGTLVTVSSGGGGSGGGG |
| | | | | SGGGGSEIVLTQSPATLSVSPGERATLSCRASQSVSSNLAWYQQKPGQ |
| | | | | APRLLIYGASTRATGIPARFSGSGSGTEFTLTISSLQSEDFAVYYCQQYH |
| | | | | TWPPVTFGCGTKVEIK |
| 370. | CD20 82-G2 CC x | arti- | aa | EVQLVESGGGLVQPGRSLRLSCAASGFTFHDYTMHWVRQAPGKCLEW |
| | CD22 53-D6 CC | ficial | | VSGISWNTGTIGYADSVKGRFTISRDNAKNSLYLQMNSLRAEDTALYY |
| | clipopt | | | CVKDAFYGGDYYYNYGMDVWGHGTTVTVSSGGGGQGGGGQGGGG |
| | | | | QEIVLTQSPATLSVSPGERATLSCRASQSVNNNLAWYQQKPGQAPRLLI |
| | | | | YGASTRATGIPARFSGSGSGTDFTLTISSLQSDDFAVYYCQQYNNWPLT |
| | | | | FGCGTKVEIKSGGGGQQVQLVQSGAEVKKPGASVKVSCKASGYSFTS |
| | | | | YGITWVRQAPGQCLEWMGWISAYNGNTIYAQKLQGRVTMTTDTSTST |
| | | | | AYMELRSLRSDDTAVYYCVRDSNHEDFWGQGTLVTVSSGGGGQGGG |
| | | | | GQGGGGQEIVLTQSPATLSVSPGERATLSCRASQSVSSNLAWYQQKPG |
| | | | | QAPRLLIYGASTRATGIPARFSGSGSGTEFTLTISSLQSEDFAVYYCQQY |
| | | | | HTWPPVTFGCGTKVEIK |
| 371. | CD20 82-G2 CC x | arti- | aa | EVQLVESGGGLVQPGRSLRLSCAASGFTFHDYTMHWVRQAPGKCLEW |
| | CD22 53-D6 CC x | ficial | | VSGISWNTGTIGYADSVKGRFTISRDNAKNSLYLQMNSLRAEDTALYY |
| | I2C | | | CVKDAFYGGDYYYNYGMDVWGHGTTVTVSSGGGGSGGGGSGGGGS |
| | | | | EIVLTQSPATLSVSPGERATLSCRASQSVNNNLAWYQQKPGQAPRLLIY |
| | | | | GASTRATGIPARFSGSGSGTDFTLTISSLQSDDFAVYYCQQYNNWPLTF |
| | | | | GCGTKVEIKSGGGGSQVQLVQSGAEVKKPGASVKVSCKASGYSFTSY |
| | | | | GITWVRQAPGQCLEWMGWISAYNGNTIYAQKLQGRVTMTTDTSTSTA |
| | | | | YMELRSLRSDDTAVYYCVRDSNHEDFWGQGTLVTVSSGGGGSGGGG |
| | | | | SGGGGSEIVLTQSPATLSVSPGERATLSCRASQSVSSNLAWYQQKPGQ |
| | | | | APRLLIYGASTRATGIPARFSGSGSGTEFTLTISSLQSEDFAVYYCQQYH |
| | | | | TWPPVTFGCGTKVEIKSGGGGSEVQLVESGGGLVQPGGSLKLSCAASG |
| | | | | FTFNKYAMNWVRQAPGKGLEWVARIRSKYNNYATYYADSVKDRFTIS |
| | | | | RDDSKNTAYLQMNNLKTEDTAVYYCVRHGNFGNSYISYWAYWGQGT |
| | | | | LVTVSSGGGGSGGGGSGGGGSQTVVTQEPSLTVSPGGTVTLTCGSSTG |
| | | | | AVTSGNYPNWVQQKPGQAPRGLIGGTKFLAPGTPARFSGSLLGGKAAL |
| | | | | TLSGVQPEDEAEYYCVLWYSNRWVFGGGTKLTVL |
| 372. | CD20 82-G2 CC x | arti- | aa | EVQLVESGGGLVQPGRSLRLSCAASGFTFHDYTMHWVRQAPGKCLEW |
| | CD22 53-D6 CC x | ficial | | VSGISWNTGTIGYADSVKGRFTISRDNAKNSLYLQMNSLRAEDTALYY |
| | I2C clipopt | | | CVKDAFYGGDYYYNYGMDVWGHGTTVTVSSGGGGQGGGGQGGGG |
| | | | | QEIVLTQSPATLSVSPGERATLSCRASQSVNNNLAWYQQKPGQAPRLLI |
| | | | | YGASTRATGIPARFSGSGSGTDFTLTISSLQSDDFAVYYCQQYNNWPLT |
| | | | | FGCGTKVEIKSGGGGQQVQLVQSGAEVKKPGASVKVSCKASGYSFTS |
| | | | | YGITWVRQAPGQCLEWMGWISAYNGNTIYAQKLQGRVTMTTDTSTST |
| | | | | AYMELRSLRSDDTAVYYCVRDSNHEDFWGQGTLVTVSSGGGGQGGG |
| | | | | GQGGGGQEIVLTQSPATLSVSPGERATLSCRASQSVSSNLAWYQQKPG |
| | | | | QAPRLLIYGASTRATGIPARFSGSGSGTEFTLTISSLQSEDFAVYYCQQY |
| | | | | HTWPPVTFGCGTKVEIKSGGGGQEVQLVESGGGLVQPGGSLKLSCAAS |
| | | | | GFTFNKYAMNWVRQAPGKGLEWVARIRSKYNNYATYYADSVKDRFT |
| | | | | ISRDDSKNTAYLQMNNLKTEDTAVYYCVRHGNFGNSYISYWAYWGQ |
| | | | | GTLVTVSSGGGGQGGGGQGGGGQQTVVTQEPSLTVSPGGTVTLTCGS |
| | | | | STGAVTSGNYPNWVQQKPGQAPRGLIGGTKFLAPGTPARFSGSLLGGK |
| | | | | AALTLSGVQPEDEAEYYCVLWYSNRWVFGGGTKLTVL |
| 373. | CD20 82-G2 CC x | arti- | aa | EVQLVESGGGLVQPGRSLRLSCAASGFTFHDYTMHWVRQAPGKCLEW |
| | CD22 53-D6 CC x | ficial | | VSGISWNTGTIGYADSVKGRFTISRDNAKNSLYLQMNSLRAEDTALYY |
| | I2E | | | CVKDAFYGGDYYYNYGMDVWGHGTTVTVSSGGGGSGGGGSGGGGS |
| | | | | EIVLTQSPATLSVSPGERATLSCRASQSVNNNLAWYQQKPGQAPRLLIY |
| | | | | GASTRATGIPARFSGSGSGTDFTLTISSLQSDDFAVYYCQQYNNWPLTF |
| | | | | GCGTKVEIKSGGGGSQVQLVQSGAEVKKPGASVKVSCKASGYSFTSY |
| | | | | GITWVRQAPGQCLEWMGWISAYNGNTIYAQKLQGRVTMTTDTSTSTA |
| | | | | YMELRSLRSDDTAVYYCVRDSNHEDFWGQGTLVTVSSGGGGSGGGG |
| | | | | SGGGGSEIVLTQSPATLSVSPGERATLSCRASQSVSSNLAWYQQKPGQ |
| | | | | APRLLIYGASTRATGIPARFSGSGSGTEFTLTISSLQSEDFAVYYCQQYH |
| | | | | TWPPVTFGCGTKVEIKSGGGGSEVQLVESGGGLVQPGGSLKLSCAASG |
| | | | | FTFNKYAINWVRQAPGKGLEWVARIRSKYNNYATYYADAVKDRFTIS |
| | | | | RDDSKNTVYLQMNNLKTEDTAVYYCARAGNFGSSYISYWAYWGQGT |
| | | | | LVTVSSGGGGSGGGGSGGGGSQTVVTQEPSLTVSPGGTVTITCGSSTG |
| | | | | AVTSGNYPNWVQKKPGQAPRGLIGGTKFLAPGTPARFSGSLSGGKAAL |
| | | | | TLSGVQPEDEAEYYCVLWYSNRWVFGSGTKLTVL |
| 374. | CD20 82-G2 CC x | arti- | aa | EVQLVESGGGLVQPGRSLRLSCAASGFTFHDYTMHWVRQAPGKCLEW |
| | CD22 53-D6 CC x | ficial | | VSGISWNTGTIGYADSVKGRFTISRDNAKNSLYLQMNSLRAEDTALYY |
| | I2E clipopt | | | CVKDAFYGGDYYYNYGMDVWGHGTTVTVSSGGGGQGGGGQGGGG |
| | | | | QEIVLTQSPATLSVSPGERATLSCRASQSVNNNLAWYQQKPGQAPRLLI |
| | | | | YGASTRATGIPARFSGSGSGTDFTLTISSLQSDDFAVYYCQQYNNWPLT |
| | | | | FGCGTKVEIKSGGGGQQVQLVQSGAEVKKPGASVKVSCKASGYSFTS |
| | | | | YGITWVRQAPGQCLEWMGWISAYNGNTIYAQKLQGRVTMTTDTSTST |
| | | | | AYMELRSLRSDDTAVYYCVRDSNHEDFWGQGTLVTVSSGGGGQGGG |
| | | | | GQGGGGQEIVLTQSPATLSVSPGERATLSCRASQSVSSNLAWYQQKPG |
| | | | | QAPRLLIYGASTRATGIPARFSGSGSGTEFTLTISSLQSEDFAVYYCQQY |
| | | | | HTWPPVTFGCGTKVEIKSGGGGQEVQLVESGGGLVQPGGSLKLSCAAS |
| | | | | GFTFNKYAINWVRQAPGKGLEWVARIRSKYNNYATYYADAVKDRFTI |
| | | | | SRDDSKNTVYLQMNNLKTEDTAVYYCARAGNFGSSYISYWAYWGQG |
| | | | | TLVTVSSGGGGQGGGGQGGGGQQTVVTQEPSLTVSPGGTVTITCGSST |
| | | | | GAVTSGNYPNWVQKKPGQAPRGLIGGTKFLAPGTPARFSGSLSGGKA |
| | | | | ALTLSGVQPEDEAEYYCVLWYSNRWVFGSGTKLTVL |
| 375. | CD20 82-G2 CC x | arti- | aa | EVQLVESGGGLVQPGRSLRLSCAASGFTFHDYTMHWVRQAPGKCLEW |
| | CD22 53-D6 CC x | ficial | | VSGISWNTGTIGYADSVKGRFTISRDNAKNSLYLQMNSLRAEDTALYY |
| | I2C x scFc | | | CVKDAFYGGDYYYNYGMDVWGHGTTVTVSSGGGGSGGGGSGGGGS |
| | | | | EIVLTQSPATLSVSPGERATLSCRASQSVNNNLAWYQQKPGQAPRLLIY |
| | | | | GASTRATGIPARFSGSGSGTDFTLTISSLQSDDFAVYYCQQYNNWPLTF |
| | | | | GCGTKVEIKSGGGGSQVQLVQSGAEVKKPGASVKVSCKASGYSFTSY |
| | | | | GITWVRQAPGQCLEWMGWISAYNGNTIYAQKLQGRVTMTTDTSTSTA |
| | | | | YMELRSLRSDDTAVYYCVRDSNHEDFWGQGTLVTVSSGGGGSGGGG |
| | | | | SGGGGSEIVLTQSPATLSVSPGERATLSCRASQSVSSNLAWYQQKPGQ |
| | | | | APRLLIYGASTRATGIPARFSGSGSGTEFTLTISSLQSEDFAVYYCQQYH |
| | | | | TWPPVTFGCGTKVEIKSGGGGSEVQLVESGGGLVQPGGSLKLSCAASG |
| | | | | FTFNKYAMNWVRQAPGKGLEWVARIRSKYNNYATYYADSVKDRFTIS |
| | | | | RDDSKNTAYLQMNNLKTEDTAVYYCVRHGNFGNSYISYWAYWGQGT |
| | | | | LVTVSSGGGGSGGGGSGGGGSQTVVTQEPSLTVSPGGTVTLTCGSSTG |
| | | | | AVTSGNYPNWVQQKPGQAPRGLIGGTKFLAPGTPARFSGSLLGGKAAL |
| | | | | TLSGVQPEDEAEYYCVLWYSNRWVFGGGTKLTVLGGGGDKTHTCPPC |
| | | | | PAPELLGGPSVFLFPPKPKDTLMISRTPEVTCVVVDVSHEDPEVKFNWY |
| | | | | VDGVEVHNAKTKPCEEQYGSTYRCVSVLTVLHQDWLNGKEYKCKVS |
| | | | | NKALPAPIEKTISKAKGQPREPQVYTLPPSREEMTKNQVSLTCLVKGFY |
| | | | | PSDIAVEWESNGQPENNYKTTPPVLDSDGSFFLYSKLTVDKSRWQQGN |
| | | | | VFSCSVMHEALHNHYTQKSLSLSPGKGGGGSGGGGSGGGGSGGGGSG |
| | | | | GGGSGGGGSDKTHTCPPCPAPELLGGPSVFLFPPKPKDTLMISRTPEVT |
| | | | | CVVVDVSHEDPEVKFNWYVDGVEVHNAKTKPCEEQYGSTYRCVSVL |
| | | | | TVLHQDWLNGKEYKCKVSNKALPAPIEKTISKAKGQPREPQVYTLPPS |
| | | | | REEMTKNQVSLTCLVKGFYPSDIAVEWESNGQPENNYKTTPPVLDSDG |
| | | | | SFFLYSKLTVDKSRWQQGNVFSCSVMHEALHNHYTQKSLSLSPGK |
| 376. | CD20 82-G2 CC x | arti- | aa | EVQLVESGGGLVQPGRSLRLSCAASGFTFHDYTMHWVRQAPGKCLEW |
| | CD22 53-D6 CC x | ficial | | VSGISWNTGTIGYADSVKGRFTISRDNAKNSLYLQMNSLRAEDTALYY |
| | I2C x scFc | | | CVKDAFYGGDYYYNYGMDVWGHGTTVTVSSGGGGQGGGGQGGGG |
| | clipopt | | | QEIVLTQSPATLSVSPGERATLSCRASQSVNNNLAWYQQKPGQAPRLLI |
| | | | | YGASTRATGIPARFSGSGSGTDFTLTISSLQSDDFAVYYCQQYNNWPLT |
| | | | | FGCGTKVEIKSGGGGQQVQLVQSGAEVKKPGASVKVSCKASGYSFTS |
| | | | | YGITWVRQAPGQCLEWMGWISAYNGNTIYAQKLQGRVTMTTDTSTST |
| | | | | AYMELRSLRSDDTAVYYCVRDSNHEDFWGQGTLVTVSSGGGGQGGG |
| | | | | GQGGGGQEIVLTQSPATLSVSPGERATLSCRASQSVSSNLAWYQQKPG |
| | | | | QAPRLLIYGASTRATGIPARFSGSGSGTEFTLTISSLQSEDFAVYYCQQY |
| | | | | HTWPPVTFGCGTKVEIKSGGGGQEVQLVESGGGLVQPGGSLKLSCAAS |
| | | | | GFTFNKYAMNWVRQAPGKGLEWVARIRSKYNNYATYYADSVKDRFT |
| | | | | ISRDDSKNTAYLQMNNLKTEDTAVYYCVRHGNFGNSYISYWAYWGQ |
| | | | | GTLVTVSSGGGGQGGGGQGGGGQQTVVTQEPSLTVSPGGTVTLTCGS |
| | | | | STGAVTSGNYPNWVQQKPGQAPRGLIGGTKFLAPGTPARFSGSLLGGK |
| | | | | AALTLSGVQPEDEAEYYCVLWYSNRWVFGGGTKLTVLGGGGCPPCPA |
| | | | | PELLGGPSVFLFPPKPKDTLMISRTPEVTCVVVDVSHEEPEVKFNWYVD |
| | | | | GVEVHNAKTKPCEEQYGSTYRCVSVLTVLHQDWLNGKEYKCKVSNK |
| | | | | ALPAPIEKTISKAKGQPREPQVYTLPPSREEMTKNQVSLTCLVKGFYPS |
| | | | | DIAVEWESNGQPENNYKTTPPVLDSDGSFFLYSKLTVDKSRWQQGNVF |
| | | | | SCSVMHEALHNHYTQKSLSLSPGKGGGGQGGGGQGGGGQGGGGQGG |
| | | | | GGQGGGGQCPPCPAPELLGGPSVFLFPPKPKDTLMISRTPEVTCVVVDV |
| | | | | SHEEPEVKFNWYVDGVEVHNAKTKPCEEQYGSTYRCVSVLTVLHQD |
| | | | | WLNGKEYKCKVSNKALPAPIEKTISKAKGQPREPQVYTLPPSREEMTK |
| | | | | NQVSLTCLVKGFYPSDIAVEWESNGQPENNYKTTPPVLDSDGSFFLYS |
| | | | | KLTVDKSRWQQGNVFSCSVMHEALHNHYTQKSLSLSPGK |
| 377. | CD20 82-G2 CC x | arti- | aa | EVQLVESGGGLVQPGRSLRLSCAASGFTFHDYTMHWVRQAPGKCLEW |
| | CD22 53-D6 CC x | ficial | | VSGISWNTGTIGYADSVKGRFTISRDNAKNSLYLQMNSLRAEDTALYY |
| | I2E x scFc | | | CVKDAFYGGDYYYNYGMDVWGHGTTVTVSSGGGGSGGGGSGGGGS |
| | | | | EIVLTQSPATLSVSPGERATLSCRASQSVNNNLAWYQQKPGQAPRLLIY |
| | | | | GASTRATGIPARFSGSGSGTDFTLTISSLQSDDFAVYYCQQYNNWPLTF |
| | | | | GCGTKVEIKSGGGGSQVQLVQSGAEVKKPGASVKVSCKASGYSFTSY |
| | | | | GITWVRQAPGQCLEWMGWISAYNGNTIYAQKLQGRVTMTTDTSTSTA |
| | | | | YMELRSLRSDDTAVYYCVRDSNHEDFWGQGTLVTVSSGGGGSGGGG |
| | | | | SGGGGSEIVLTQSPATLSVSPGERATLSCRASQSVSSNLAWYQQKPGQ |
| | | | | APRLLIYGASTRATGIPARFSGSGSGTEFTLTISSLQSEDFAVYYCQQYH |
| | | | | TWPPVTFGCGTKVEIKSGGGGSEVQLVESGGGLVQPGGSLKLSCAASG |
| | | | | FTFNKYAINWVRQAPGKGLEWVARIRSKYNNYATYYADAVKDRFTIS |
| | | | | RDDSKNTVYLQMNNLKTEDTAVYYCARAGNFGSSYISYWAYWGQGT |
| | | | | LVTVSSGGGGSGGGGSGGGGSQTVVTQEPSLTVSPGGTVTITCGSSTG |
| | | | | AVTSGNYPNWVQKKPGQAPRGLIGGTKFLAPGTPARFSGSLSGGKAAL |
| | | | | TLSGVQPEDEAEYYCVLWYSNRWVFGSGTKLTVLGGGGDKTHTCPPC |
| | | | | PAPELLGGPSVFLFPPKPKDTLMISRTPEVTCVVVDVSHEDPEVKFNWY |
| | | | | VDGVEVHNAKTKPCEEQYGSTYRCVSVLTVLHQDWLNGKEYKCKVS |
| | | | | NKALPAPIEKTISKAKGQPREPQVYTLPPSREEMTKNQVSLTCLVKGFY |
| | | | | PSDIAVEWESNGQPENNYKTTPPVLDSDGSFFLYSKLTVDKSRWQQGN |
| | | | | VFSCSVMHEALHNHYTQKSLSLSPGKGGGGSGGGGSGGGGSGGGGSG |
| | | | | GGGSGGGGSDKTHTCPPCPAPELLGGPSVFLFPPKPKDTLMISRTPEVT |
| | | | | CVVVDVSHEDPEVKFNWYVDGVEVHNAKTKPCEEQYGSTYRCVSVL |
| | | | | TVLHQDWLNGKEYKCKVSNKALPAPIEKTISKAKGQPREPQVYTLPPS |
| | | | | REEMTKNQVSLTCLVKGFYPSDIAVEWESNGQPENNYKTTPPVLDSDG |
| | | | | SFFLYSKLTVDKSRWQQGNVFSCSVMHEALHNHYTQKSLSLSPGK |
| 378. | CD20 82-G2 CC x | arti- | aa | EVQLVESGGGLVQPGRSLRLSCAASGFTFHDYTMHWVRQAPGKCLEW |
| | CD22 53-D6 CC x | ficial | | VSGISWNTGTIGYADSVKGRFTISRDNAKNSLYLQMNSLRAEDTALYY |
| | I2E x scFc | | | CVKDAFYGGDYYYNYGMDVWGHGTTVTVSSGGGGQGGGGQGGGG |
| | clipopt | | | QEIVLTQSPATLSVSPGERATLSCRASQSVNNNLAWYQQKPGQAPRLLI |
| | | | | YGASTRATGIPARFSGSGSGTDFTLTISSLQSDDFAVYYCQQYNNWPLT |
| | | | | FGCGTKVEIKSGGGGQQVQLVQSGAEVKKPGASVKVSCKASGYSFTS |
| | | | | YGITWVRQAPGQCLEWMGWISAYNGNTIYAQKLQGRVTMTTDTSTST |
| | | | | AYMELRSLRSDDTAVYYCVRDSNHEDFWGQGTLVTVSSGGGGQGGG |
| | | | | GQGGGGQEIVLTQSPATLSVSPGERATLSCRASQSVSSNLAWYQQKPG |
| | | | | QAPRLLIYGASTRATGIPARFSGSGSGTEFTLTISSLQSEDFAVYYCQQY |
| | | | | HTWPPVTFGCGTKVEIKSGGGGQEVQLVESGGGLVQPGGSLKLSCAAS |
| | | | | GFTFNKYAINWVRQAPGKGLEWVARIRSKYNNYATYYADAVKDRFTI |
| | | | | SRDDSKNTVYLQMNNLKTEDTAVYYCARAGNFGSSYISYWAYWGQG |
| | | | | TLVTVSSGGGGQGGGGQGGGGQQTVVTQEPSLTVSPGGTVTITCGSST |
| | | | | GAVTSGNYPNWVQKKPGQAPRGLIGGTKFLAPGTPARFSGSLSGGKA |
| | | | | ALTLSGVQPEDEAEYYCVLWYSNRWVFGSGTKLTVLGGGGCPPCPAP |
| | | | | ELLGGPSVFLFPPKPKDTLMISRTPEVTCVVVDVSHEEPEVKFNWYVD |
| | | | | GVEVHNAKTKPCEEQYGSTYRCVSVLTVLHQDWLNGKEYKCKVSNK |
| | | | | ALPAPIEKTISKAKGQPREPQVYTLPPSREEMTKNQVSLTCLVKGFYPS |
| | | | | DIAVEWESNGQPENNYKTTPPVLDSDGSFFLYSKLTVDKSRWQQGNVF |
| | | | | SCSVMHEALHNHYTQKSLSLSPGKGGGGQGGGGQGGGGQGGGGQGG |
| | | | | GGQGGGGQCPPCPAPELLGGPSVFLFPPKPKDTLMISRTPEVTCVVVDV |
| | | | | SHEEPEVKFNWYVDGVEVHNAKTKPCEEQYGSTYRCVSVLTVLHQD |
| | | | | WLNGKEYKCKVSNKALPAPIEKTISKAKGQPREPQVYTLPPSREEMTK |
| | | | | NQVSLTCLVKGFYPSDIAVEWESNGQPENNYKTTPPVLDSDGSFFLYS |
| | | | | KLTVDKSRWQQGNVFSCSVMHEALHNHYTQKSLSLSPGK |
| 379. | HCDR1 CD22 43- | arti- | aa | SYGIS |
| | A8 CC | ficial | | |
| 380. | HCDR2 | arti- | aa | WISAYTGETLYAQKLQG |
| | | ficial | | |
| 381. | HCDR3 | arti- | aa | DPDYYGSGSYSDY |
| | | ficial | | |
| 382. | LCDR1 | arti- | aa | RASQSVSSNLA |
| | | ficial | | |
| 383. | LCDR2 | arti- | aa | GASSRAT |
| | | ficial | | |
| 384. | LCDR3 | arti- | aa | QQYHSWPLLT |
| | | ficial | | |
| 385. | VH | arti- | aa | QVQLVQSGGEVKKPGASVKVSCKASGYTFTSYGISWVRQAPGQCLEW |
| | | ficial | | MGWISAYTGETLYAQKLQGRVTMTRDTSTSTAYMELRSLRSDDTAVY |
| | | | | YCARDPDYYGSGSYSDYWGQGTLVTVSS |
| 386. | VL | arti- | aa | EIVLTQSPATLSVSPGERATLSCRASQSVSSNLAWYQQKPGQAPRLLIY |
| | | ficial | | GASSRATGIPARFSGSGSGTEFTLTISSLQSEDFAVYYCQQYHSWPLLTF |
| | | | | GCGTKVEIK |
| 387. | scFv | arti- | aa | QVQLVQSGGEVKKPGASVKVSCKASGYTFTSYGISWVRQAPGQCLEW |
| | | ficial | | MGWISAYTGETLYAQKLQGRVTMTRDTSTSTAYMELRSLRSDDTAVY |
| | | | | YCARDPDYYGSGSYSDYWGQGTLVTVSSGGGGSGGGGSGGGGSEIVL |
| | | | | TQSPATLSVSPGERATLSCRASQSVSSNLAWYQQKPGQAPRLLIYGASS |
| | | | | RATGIPARFSGSGSGTEFTLTISSLQSEDFAVYYCQQYHSWPLLTFGCGT |
| | | | | KVEIK |
| 388. | BISPECIFIC | arti- | aa | QVQLVQSGGEVKKPGASVKVSCKASGYTFTSYGISWVRQAPGQCLEW |
| | MOL. (I2C) | ficial | | MGWISAYTGETLYAQKLQGRVTMTRDTSTSTAYMELRSLRSDDTAVY |
| | | | | YCARDPDYYGSGSYSDYWGQGTLVTVSSGGGGSGGGGSGGGGSEIVL |
| | | | | TQSPATLSVSPGERATLSCRASQSVSSNLAWYQQKPGQAPRLLIYGASS |
| | | | | RATGIPARFSGSGSGTEFTLTISSLQSEDFAVYYCQQYHSWPLLTFGCGT |
| | | | | KVEIKSGGGGSEVQLVESGGGLVQPGGSLKLSCAASGFTFNKYAMNW |
| | | | | VRQAPGKGLEWVARIRSKYNNYATYYADSVKDRFTISRDDSKNTAYL |
| | | | | QMNNLKTEDTAVYYCVRHGNFGNSYISYWAYWGQGTLVTVSSGGGG |
| | | | | SGGGGSGGGGSQTVVTQEPSLTVSPGGTVTLTCGSSTGAVTSGNYPNW |
| | | | | VQQKPGQAPRGLIGGTKFLAPGTPARFSGSLLGGKAALTLSGVQPEDE |
| | | | | AEYYCVLWYSNRWVFGGGTKLTVL |
| 389. | BISPECIFIC | arti- | aa | QVQLVQSGGEVKKPGASVKVSCKASGYTFTSYGISWVRQAPGQCLEW |
| | MOL. (I2E) | ficial | | MGWISAYTGETLYAQKLQGRVTMTRDTSTSTAYMELRSLRSDDTAVY |
| | | | | YCARDPDYYGSGSYSDYWGQGTLVTVSSGGGGSGGGGSGGGGSEIVL |
| | | | | TQSPATLSVSPGERATLSCRASQSVSSNLAWYQQKPGQAPRLLIYGASS |
| | | | | RATGIPARFSGSGSGTEFTLTISSLQSEDFAVYYCQQYHSWPLLTFGCGT |
| | | | | KVEIKSGGGGSEVQLVESGGGLVQPGGSLKLSCAASGFTFNKYAINWV |
| | | | | RQAPGKGLEWVARIRSKYNNYATYYADAVKDRFTISRDDSKNTVYLQ |
| | | | | MNNLKTEDTAVYYCARAGNFGSSYISYWAYWGQGTLVTVSSGGGGS |
| | | | | GGGGSGGGGSQTVVTQEPSLTVSPGGTVTITCGSSTGAVTSGNYPNWV |
| | | | | QKKPGQAPRGLIGGTKFLAPGTPARFSGSLSGGKAALTLSGVQPEDEAE |
| | | | | YYCVLWYSNRWVFGSGTKLTVL |
| 390. | BiTE HLE (I2C) | arti- | aa | QVQLVQSGGEVKKPGASVKVSCKASGYTFTSYGISWVRQAPGQCLEW |
| | | ficial | | MGWISAYTGETLYAQKLQGRVTMTRDTSTSTAYMELRSLRSDDTAVY |
| | | | | YCARDPDYYGSGSYSDYWGQGTLVTVSSGGGGSGGGGSGGGGSEIVL |
| | | | | TQSPATLSVSPGERATLSCRASQSVSSNLAWYQQKPGQAPRLLIYGASS |
| | | | | RATGIPARFSGSGSGTEFTLTISSLQSEDFAVYYCQQYHSWPLLTFGCGT |
| | | | | KVEIKSGGGGSEVQLVESGGGLVQPGGSLKLSCAASGFTFNKYAMNW |
| | | | | VRQAPGKGLEWVARIRSKYNNYATYYADSVKDRFTISRDDSKNTAYL |
| | | | | QMNNLKTEDTAVYYCVRHGNFGNSYISYWAYWGQGTLVTVSSGGGG |
| | | | | SGGGGSGGGGSQTVVTQEPSLTVSPGGTVTLTCGSSTGAVTSGNYPNW |
| | | | | VQQKPGQAPRGLIGGTKFLAPGTPARFSGSLLGGKAALTLSGVQPEDE |
| | | | | AEYYCVLWYSNRWVFGGGTKLTVLGGGGDKTHTCPPCPAPELLGGPS |
| | | | | VFLFPPKPKDTLMISRTPEVTCVVVDVSHEDPEVKFNWYVDGVEVHN |
| | | | | AKTKPCEEQYGSTYRCVSVLTVLHQDWLNGKEYKCKVSNKALPAPIE |
| | | | | KTISKAKGQPREPQVYTLPPSREEMTKNQVSLTCLVKGFYPSDIAVEWE |
| | | | | SNGQPENNYKTTPPVLDSDGSFFLYSKLTVDKSRWQQGNVFSCSVMH |
| | | | | EALHNHYTQKSLSLSPGKGGGGSGGGGSGGGGSGGGGSGGGGSGGG |
| | | | | GSDKTHTCPPCPAPELLGGPSVFLFPPKPKDTLMISRTPEVTCVVVDVS |
| | | | | HEDPEVKFNWYVDGVEVHNAKTKPCEEQYGSTYRCVSVLTVLHQDW |
| | | | | LNGKEYKCKVSNKALPAPIEKTISKAKGQPREPQVYTLPPSREEMTKN |
| | | | | QVSLTCLVKGFYPSDIAVEWESNGQPENNYKTTPPVLDSDGSFFLYSKL |
| | | | | TVDKSRWQQGNVFSCSVMHEALHNHYTQKSLSLSPGK |
| 391. | BiTE HLE (I2E) | arti- | aa | QVQLVQSGGEVKKPGASVKVSCKASGYTFTSYGISWVRQAPGQCLEW |
| | | ficial | | MGWISAYTGETLYAQKLQGRVTMTRDTSTSTAYMELRSLRSDDTAVY |
| | | | | YCARDPDYYGSGSYSDYWGQGTLVTVSSGGGGSGGGGSGGGGSEIVL |
| | | | | TQSPATLSVSPGERATLSCRASQSVSSNLAWYQQKPGQAPRLLIYGASS |
| | | | | RATGIPARFSGSGSGTEFTLTISSLQSEDFAVYYCQQYHSWPLLTFGCGT |
| | | | | KVEIKSGGGGSEVQLVESGGGLVQPGGSLKLSCAASGFTFNKYAINWV |
| | | | | RQAPGKGLEWVARIRSKYNNYATYYADAVKDRFTISRDDSKNTVYLQ |
| | | | | MNNLKTEDTAVYYCARAGNFGSSYISYWAYWGQGTLVTVSSGGGGS |
| | | | | GGGGSGGGGSQTVVTQEPSLTVSPGGTVTITCGSSTGAVTSGNYPNWV |
| | | | | QKKPGQAPRGLIGGTKFLAPGTPARFSGSLSGGKAALTLSGVQPEDEAE |
| | | | | YYCVLWYSNRWVFGSGTKLTVLGGGGDKTHTCPPCPAPELLGGPSVF |
| | | | | LFPPKPKDTLMISRTPEVTCVVVDVSHEDPEVKFNWYVDGVEVHNAK |
| | | | | TKPCEEQYGSTYRCVSVLTVLHQDWLNGKEYKCKVSNKALPAPIEKTI |
| | | | | SKAKGQPREPQVYTLPPSREEMTKNQVSLTCLVKGFYPSDIAVEWESN |
| | | | | GQPENNYKTTPPVLDSDGSFFLYSKLTVDKSRWQQGNVFSCSVMHEA |
| | | | | LHNHYTQKSLSLSPGKGGGGSGGGGSGGGGSGGGGSGGGGSGGGGSD |
| | | | | KTHTCPPCPAPELLGGPSVFLFPPKPKDTLMISRTPEVTCVVVDVSHEDP |
| | | | | EVKFNWYVDGVEVHNAKTKPCEEQYGSTYRCVSVLTVLHQDWLNGK |
| | | | | EYKCKVSNKALPAPIEKTISKAKGQPREPQVYTLPPSREEMTKNQVSLT |
| | | | | CLVKGFYPSDIAVEWESNGQPENNYKTTPPVLDSDGSFFLYSKLTVDK |
| | | | | SRWQQGNVFSCSVMHEALHNHYTQKSLSLSPGK |
| 392. | I2C - HCDR1 | arti- | Aa | KYAMN |
| | | ficial | | |
| 393. | I2C - HCDR2 | arti- | Aa | RIRSKYNNYATYYADSVKD |
| | | ficial | | |
| 394. | I2C - HCDR3 | arti- | Aa | HGNFGNSYISYWAY |
| | | ficial | | |
| 395. | I2C - LCDR1 | arti- | Aa | GSSTGAVTSGNYPN |
| | | ficial | | |
| 396. | I2C - LCDR2 | arti- | aa | GTKFLAP |
| | | ficial | | |
| 397. | I2C - LCDR3 | arti- | aa | VLWYSNRWV |
| | | ficial | | |
| 398. | I2C - VH | arti- | aa | EVQLVESGGGLVQPGGSLKLSCAASGFTFNKYAMNWVRQAPGKGLE |
| | | ficial | | WVARIRSKYNNYATYYADSVKDRFTISRDDSKNTAYLQMNNLKTEDT |
| | | | | AVYYCVRHGNFGNSYISYWAYWGQGTLVTVSS |
| 399. | I2C - VL | arti- | aa | QTVVTQEPSLTVSPGGTVTLTCGSSTGAVTSGNYPNWVQQKPGQAPR |
| | | ficial | | GLIGGTKFLAPGTPARFSGSLLGGKAALTLSGVQPEDEAEYYCVLWYS |
| | | | | NRWVFGGGTKLTVL |
| 400. | I2C- VHVL | arti- | aa | EVQLVESGGGLVQPGGSLKLSCAASGFTFNKYAMNWVRQAPGKGLE |
| | | ficial | | WVARIRSKYNNYATYYADSVKDRFTISRDDSKNTAYLQMNNLKTEDT |
| | | | | AVYYCVRHGNFGNSYISYWAYWGQGTLVTVSSGGGGSGGGGSGGGG |
| | | | | SQTVVTQEPSLTVSPGGTVTLTCGSSTGAVTSGNYPNWVQQKPGQAPR |
| | | | | GLIGGTKFLAPGTPARFSGSLLGGKAALTLSGVQPEDEAEYYCVLWYS |
| | | | | NRWVFGGGTKLTVL |
| 401. | I2E - HCDR1 | arti- | Aa | KYAIN |
| | | ficial | | |
| 402. | I2E - HCDR2 | arti- | Aa | RIRSKYNNYATYYADAVKD |
| | | ficial | | |
| 403. | I2E - HCDR3 | arti- | Aa | AGNFGSSYISYWAY |
| | | ficial | | |
| 404. | I2E - LCDR1 | arti- | Aa | GSSTGAVTSGNYPN |
| | | ficial | | |
| 405. | I2E - LCDR2 | arti- | Aa | GTKFLAP |
| | | ficial | | |
| 406. | I2E - LCDR3 | arti- | aa | VLWYSNRWV |
| | | ficial | | |
| 407. | I2E - VH | arti- | aa | EVQLVESGGGLVQPGGSLKLSCAASGFTFNKYAINWVRQAPGKGLEW |
| | | ficial | | VARIRSKYNNYATYYADAVKDRFTISRDDSKNTVYLQMNNLKTEDTA |
| | | | | VYYCARAGNFGSSYISYWAYWGQGTLVTVSS |
| 408. | I2E - VL | arti- | aa | QTVVTQEPSLTVSPGGTVTITCGSSTGAVTSGNYPNWVQKKPGQAPRG |
| | | ficial | | LIGGTKFLAPGTPARFSGSLSGGKAALTLSGVQPEDEAEYYCVLWYSN |
| | | | | RWVFGSGTKLTVL |
| 409. | I2E VHVL | arti- | aa | EVQLVESGGGLVQPGGSLKLSCAASGFTFNKYAINWVRQAPGKGLEW |
| | | ficial | | VARIRSKYNNYATYYADAVKDRFTISRDDSKNTVYLQMNNLKTEDTA |
| | | | | VYYCARAGNFGSSYISYWAYWGQGTLVTVSSGGGGSGGGGSGGGGS |
| | | | | QTVVTQEPSLTVSPGGTVTITCGSSTGAVTSGNYPNWVQKKPGQAPRG |
| | | | | LIGGTKFLAPGTPARFSGSLSGGKAALTLSGVQPEDEAEYYCVLWYSN |
| | | | | RWVFGSGTKLTVL |

1. A CD20 and CD22 targeting antigen-binding molecule comprising at least three binding domains, wherein
(i) the first binding domain comprises a paratope which immuno-specifically binds to CD20, wherein the first binding domain comprises a VH region comprising CDR-H1, CDR-H2 and CDR-H3 and a VL region comprising CDR-L1, CDR-L2 and CDR-L3 selected from:
a) CDR H1-3 of SEQ ID NO: 58-60 and CDR L1-3 of SEQ ID NO: 61-63,
b) CDR H1-3 of SEQ ID NO: 71-73 and CDR L1-3 of SEQ ID NO: 74-76,
c) CDR H1-3 of SEQ ID NO: 84-86 and CDR L1-3 of SEQ ID NO: 87-89, and
d) CDR H1-3 of SEQ ID NO: 97⁻⁹⁹ and CDR L1-3 of SEQ ID NO: 100-102;
(ii) the second binding domain comprises a paratope which immuno-specifically binds to CD22, wherein the first binding domain comprises a VH region comprising CDR-H1, CDR-H2 and CDR-H3 and a VL region comprising CDR-L1, CDR-L2 and CDR-L3 selected from
a) CDR H1-3 of SEQ ID NO: 138-140 and CDR L1-3 of SEQ ID NO: 141-143,
b) CDR H1-3 of SEQ ID NO: 151-153 and CDR L1-3 of SEQ ID NO: 154-156,
c) CDR H1-3 of SEQ ID NO: 164-166 and CDR L1-3 of SEQ ID NO: 167-169,
d) CDR H1-3 of SEQ ID NO: 177-179 and CDR L1-3 of SEQ ID NO: 180-182,
e) CDR H1-3 of SEQ ID NO: 190-192 and CDR L1-3 of SEQ ID NO: 193-195,
f) CDR H1-3 of SEQ ID NO: 203-205 and CDR L1-3 of SEQ ID NO: 206-208,
g) CDR H1-3 of SEQ ID NO: 125-127 and CDR L1-3 of SEQ ID NO: 128-130,
h) CDR H1-3 of SEQ ID NO: 216-218 and CDR L1-3 of SEQ ID NO: 219-221, and
i) CDR H1-3 of SEQ ID NO: 379-381 and CDR L1-3 of SEQ ID NO: 382-384; and
(iii) the third binding domain comprises a paratope which immune-specifically binds to an extracellular epitope of the human and/or the Macaca CD3ε chain,
wherein the first, second and third binding domain are arranged in an amino to carboxyl order, and wherein the first binding domain and the second binding domain are linked by a peptide linker having a length of 5 to 24, preferably 18 amino acids.

2. The CD20 and CD22 targeting antigen-binding molecule of claim 1, wherein the antigen-binding molecule comprises a fourth domain which comprises two polypeptide monomers, each comprising a hinge, a CH2 and a CH3 domain, wherein said two polypeptide monomers are fused to each other via a peptide linker
wherein said forth domain preferably comprises in an amino to carboxyl order:
hinge-CH2-CH3-linker-hinge-CH2-CH3
and/or wherein preferably each of said polypeptide monomers in the fourth domain has an amino acid sequence that is at least 90% identical to a sequence selected from the group consisting of: SEQ ID NO: 17-24, wherein preferably each of said polypeptide monomers has an amino acid sequence selected from SEQ ID NO: 17-24,
and/or wherein preferably the CH2 domain comprises an intra domain cysteine disulfide bridge,
and/or wherein the first, second, third and fourth binding domain are arranged in an amino to carboxyl order.

3. The CD20 and CD22 targeting antigen-binding molecule of claim 1, wherein the antigen-binding molecule is a single chain antigen-binding molecule, preferably a CD20 and CD22 targeting scFv antigen-binding molecule.

4. The CD20 and CD22 targeting antigen-binding molecule of claim 1, wherein the peptide linker between the first binding domain and the second binding domain is selected from having a length of 5, 6, 7, 8, 9, 10, 11, 12, 13, 14, 15, 16, 17, 18, 19, 20, 21, 22 23, or 24 amino acids, preferably 5, 6, 7, 8, 9, 10, 11 or 12 amino acids, more preferably 6 amino acids.

5. The CD20 and CD22 targeting antigen-binding molecule of claim 1, wherein the peptide linker between the first binding domain and the second binding domain is selected from the group consisting of S(G₄S)ₙ, (G₄S)ₙ, G₄ₙ, and G₅ₙ, wherein n equals 1, 2, 3 or 4, preferably n equals 1 or 2, more preferably SG₄S.

6. The CD20 and CD22 targeting antigen-binding molecule of claim 1, wherein
the first binding domain and the second binding domain each comprise a VH region comprising CDR-H1, CDR-H2 and CDR-H3 and a VL region comprising CDR-L1, CDR-L2 and CDR-L3 selected from:
a) CDR H1-3 of SEQ ID NO: 58-60 and CDR L1-3 of SEQ ID NO: 61-63 of the first binding domain and CDR H1-3 of SEQ ID NO: 138-140 and CDR L1-3 of SEQ ID NO: 141-143 of the second binding domain;
b) CDR H1-3 of SEQ ID NO: 58-60 and CDR L1-3 of SEQ ID NO: 61-63 of the first binding domain and CDR H1-3 of SEQ ID NO: 151-153 and CDR L1-3 of SEQ ID NO: 154-156 of the second binding domain;
c) CDR H1-3 of SEQ ID NO: 58-60 and CDR L1-3 of SEQ ID NO: 61-63 of the first binding domain and CDR H1-3 of SEQ ID NO: 164-166 and CDR L1-3 of SEQ ID NO: 167-169 of the second binding domain;
d) CDR H1-3 of SEQ ID NO: 58-60 and CDR L1-3 of SEQ ID NO: 61-63 of the first binding domain and CDR H1-3 of SEQ ID NO: 177-179 and CDR L1-3 of SEQ ID NO: 180-182 of the second binding domain,
e) CDR H1-3 of SEQ ID NO: 58-60 and CDR L1-3 of SEQ ID NO: 61-63 of the first binding domain and CDR H1-3 of SEQ ID NO: 190-192 and CDR L1-3 of SEQ ID NO: 193-195 of the second binding domain;
f) CDR H1-3 of SEQ ID NO: 58-60 and CDR L1-3 of SEQ ID NO: 61-63 of the first binding domain and CDR H1-3 of SEQ ID NO: 203-205 and CDR L1-3 of SEQ ID NO: 206-208 of the second binding domain;
g) CDR H1-3 of SEQ ID NO: 58-60 and CDR L1-3 of SEQ ID NO: 61-63 of the first binding domain and CDR H1-3 of SEQ ID NO: 125-127 and CDR L1-3 of SEQ ID NO: 128-130 of the second binding domain,
h) CDR H1-3 of SEQ ID NO: 58-60 and CDR L1-3 of SEQ ID NO: 61-63 of the first binding domain and CDR H1-3 of SEQ ID NO: 216-218 and CDR L1-3 of SEQ ID NO: 219-221 of the second binding domain;
i) CDR H1-3 of SEQ ID NO: 71-73 and CDR L1-3 of SEQ ID NO: 74-76 of the first binding domain and CDR H1-3 of SEQ ID NO: 379-381 and CDR L1-3 of SEQ ID NO: 382-384 of the second binding domain,
j) CDR H1-3 of SEQ ID NO: 71-73 and CDR L1-3 of SEQ ID NO: 74-76 of the first binding domain and CDR H1-3 of SEQ ID NO: 203-205 and CDR L1-3 of SEQ ID NO: 206-208 of the second binding domain;
k) CDR H1-3 of SEQ ID NO: 84-86 and CDR L1-3 of SEQ ID NO: 87-89 of the first binding domain and CDR H1-3 of SEQ ID NO: 164-166 and CDR L1-3 of SEQ ID NO: 167-169 of the second binding domain,
l) CDR H1-3 of SEQ ID NO: 97⁻⁹⁹ and CDR L1-3 of SEQ ID NO: 100-102 of the first binding domain and CDR H1-3 of SEQ ID NO: 177-179 and CDR L1-3 of SEQ ID NO: 180-182 of the second binding domain;
m) CDR H1-3 of SEQ ID NO: 97⁻⁹⁹ and CDR L1-3 of SEQ ID NO: 100-102 of the first binding domain and CDR H1-3 of SEQ ID NO: 190-192 and CDR L1-3 of SEQ ID NO: 193-195 of the second binding domain.

7. The CD20 and CD22 targeting antigen-binding molecule of claim 1, wherein the first binding domains is capable of binding to CD20 and the second binding domain is capable of binding to CD22 simultaneously, preferably wherein CD20 and CD22 are on the same target cell,

8. The CD20 and CD22 targeting antigen-binding molecule of claim 1, wherein the third binding domain comprise a VH region comprising CDR-H1, CDR-H2 and CDR-H3 and a VL region comprising CDR-L1, CDR-L2 and CDR-L3 selected from:
a) CDR H1-3 of SEQ ID NO: 392-394 and CDR L1-3 of SEQ ID NO: 395-397; and
b) CDR H1-3 of SEQ ID NO: 401-403 and CDR L1-3 of SEQ ID NO: 404-406.

9. The CD20 and CD22 targeting antigen-binding molecule of claim 1, wherein the antigen-binding molecule comprises in an amino to carboxyl order:
(a) the first domain;
(b) a peptide linker preferably having an amino acid sequence selected from the group consisting of SEQ ID NOs: 1-4 and 9-12, preferably 11;
(c) the second domain,
(d) a peptide linker preferably having an amino acid sequence selected from the group consisting of SEQ ID NOs: 1-3; and
(e) the third domain,

10. The CD20 and CD22 targeting antigen-binding molecule according to claim 9, wherein the antigen-binding molecule further comprises in an amino to carboxyl order:
(f) a peptide linker having an amino acid sequence selected from the group consisting of SEQ ID NOs: 1, 2, 3, 9, 10, 11 and 12,
(g) the first polypeptide monomer of the fourth domain;
(h) a peptide linker having an amino acid sequence selected from the group consisting of SEQ ID NOs: 5, 6, 7 and 8; and
(i) the second polypeptide monomer of the fourth domain.

11. The CD20 and CD22 targeting antigen-binding molecule of claim 1, wherein the first binding domain comprises a VH region and a VL region selected from SEQ ID Nos: 64 as VH and 65 as L, 77 as VH and 78 as VL, 90 as VH and 91 as VL, 103 as VH and 104 as VL, respectively, and wherein the second binding domain comprises a VH region and a VL region selected from SEQ ID Nos: 144 as VH and 145 as VL, 157 and 158, 172 and 173, 183 and 184, 196 and 197, 209 and 210, 131 and 132, and 385 and 386, respectively.

12. The CD20 and CD22 targeting antigen-binding molecule of claim 1, wherein the first binding domain comprises a scFv sequence selected from the group consisting of SEQ ID Nos: 66, 79, 92, and 105, and wherein the second binding domain comprises a scFv sequence selected from the group consisting of SEQ ID Nos 146, 159, 172, 185, 198, 211, 133, 224 and 387, respectively

13. The CD20 and CD22 targeting antigen-binding molecule of claim 1, wherein the antigen-binding molecule comprises a first (CD20) and second (CD22) target binding domain together with a third effector (CD3) binding domain and a fourth domain conferring extended half-life, the three binding domains and the forth domain linked together having a sequence selected from the group consisting of SEQ ID Nos: 238, 248, 258, 268, 278, 288, 308, 318, 328, 338, 348, 368 and 378.

14. A polynucleotide encoding an antigen-binding molecule as defined in claim 1.

15. A vector comprising the polynucleotide of claim 14.

16. A host cell transformed or transfected with the polynucleotide of claim 14.

17. A process for the production of the CD20 and CD22 targeting antigen-binding molecule according to claim, said process comprising culturing the host cell of claim 16 under conditions allowing the expression of the antigen-binding molecule and recovering the produced antigen-binding molecule from the culture.

18. A pharmaceutical composition comprising the CD20 and CD22 targeting antigen-binding molecule according to claim 1.

19. (canceled)

20. A method for treating or ameliorating a proliferative disease, a tumorous disease, cancer, or an immunological disorder, comprising the step of administering to a subject in need thereof the CD20 and CD22 targeting antigen-binding molecule according to claim 1, wherein the disease preferably is Non-Hodgkin lymphoma (NHL), Non-small-cell lung carcinoma (NSCLC) and Colorectal cancer (CRC).

21. A kit comprising the CD20 and CD22 targeting antigen-binding molecule according to claim 1.

The application's sequence listing, which the Patent Office published only in electronic form, follows.

SEQUENCE LISTING (409 sequences)

SEQ ID NO: 1 - protein, 5 aa, Artificial Sequence
  Synthetic
GGGGS

SEQ ID NO: 2 - protein, 10 aa, Artificial Sequence
  Synthetic
GGGGSGGGGS

SEQ ID NO: 3 - protein, 15 aa, Artificial Sequence
  Synthetic
GGGGSGGGGSGGGGS

SEQ ID NO: 4 - protein, 20 aa, Artificial Sequence
  Synthetic
GGGGSGGGGSGGGGSGGGGS

SEQ ID NO: 5 - protein, 25 aa, Artificial Sequence
  Synthetic
GGGGSGGGGSGGGGSGGGGSGGGGS

SEQ ID NO: 6 - protein, 30 aa, Artificial Sequence
  Synthetic
GGGGSGGGGSGGGGSGGGGSGGGGSGGGGS

SEQ ID NO: 7 - protein, 35 aa, Artificial Sequence
  Synthetic
GGGGSGGGGSGGGGSGGGGSGGGGSGGGGSGGGGS

SEQ ID NO: 8 - protein, 40 aa, Artificial Sequence
  Synthetic
GGGGSGGGGSGGGGSGGGGSGGGGSGGGGSGGGGSGGGGS

SEQ ID NO: 9 - protein, 6 aa, Artificial Sequence
  Synthetic
PGGGGS

SEQ ID NO: 10 - protein, 6 aa, Artificial Sequence
  Synthetic
PGGDGS

SEQ ID NO: 11 - protein, 6 aa, Artificial Sequence
  Synthetic
SGGGGS

SEQ ID NO: 12 - protein, 4 aa, Artificial Sequence
  Synthetic
GGGG

SEQ ID NO: 13 - protein, 109 aa, Artificial Sequence
  Synthetic
QTVVTQEPSLTVSPGGTVTLTCGSSTGAVTSGNYPNWVQQKPGQAPRGLIGGTKFLAPGTPARFSGSLLGGKAALTLSGVQPEDEAEYYCVLWYSNRWVFGGGTKLTVL

SEQ ID NO: 14 - protein, 125 aa, Artificial Sequence
  Synthetic
EVQLVESGGGLVQPGGSLRLSCAASGFTFNSYAMNWVRQAPGKGLEWVARIRSKYNNYATYYADSVKGRFTISRDDSKNTAYLQMNSLKTEDTAVYYCVRHGNFGNSYVSWWAYWGQGTLVTVSS

SEQ ID NO: 15 - protein, 249 aa, Artificial Sequence
  Synthetic
EVQLVESGGGLVQPGGSLRLSCAASGFTFNSYAMNWVRQAPGKGLEWVARIRSKYNNYATYYADSVKGRFTISRDDSKNTAYLQMNSLKTEDTAVYYCVRHGNFGNSYVSWWAYWGQGTLVTVSSGGGGSGGGGSGGGGSQTVVTQEPSLTVSPGGTVTLTCGSSTGAVTSGNYPNWVQQKPGQAPRGLIGGTKFLAPGTPARFSGSLLGGKAALTLSGVQPEDEAEYYCVLWYSNRWVFGGGTKLTVL

SEQ ID NO: 16 - protein, 6 aa, Artificial Sequence
  Synthetic
HHHHHH

SEQ ID NO: 17 - protein, 227 aa, Artificial Sequence
  Synthetic
DKTHTCPPCPAPELLGGPSVFLFPPKPKDTLMISRTPEVTCVVVDVSHEDPEVKFNWYVDGVEVHNAKTKPCEEQYGSTYRCVSVLTVLHQDWLNGKEYKCKVSNKALPAPIEKTISKAKGQPREPQVYTLPPSREEMTKNQVSLTCLVKGFYPSDIAVEWESNGQPENNYKTTPPVLDSDGSFFLYSKLTVDKSRWQQGNVFSCSVMHEALHNHYTQKSLSLSPGK

SEQ ID NO: 18 - protein, 225 aa, Artificial Sequence
  Synthetic
DKTHTCPPCPAPELLGGPSVFLFPPKPKDTLMISRTPEVTCVVVDVSHEDPEVKFNWYVDGVEVHNAKTKPCEEQYGSTYRCVSVLTVLHQDWLNGKEYKCKVSNKALPAPIEKTISKAKGQPREPQVYTLPPSREEMTKNQVSLTCLVKGFYPSDIAVEWESNGQPENNYKTTPPVLDSDGSFFLYSKLTVDKSRWQQGNVFSCSVMHEALHNHYTQKSLSLSP

SEQ ID NO: 19 - protein, 227 aa, Artificial Sequence
  Synthetic
DKTHTCPPCPAPELLGGPSVFLFPPKPKDTLMISRTPEVTCVVVDVSHEDPEVKFNWYVDGVEVHNAKTKPREEQYNSTYRVVSVLTVLHQDWLNGKEYKCKVSNKALPAPIEKTISKAKGQPREPQVYTLPPSREEMTKNQVSLTCLVKGFYPSDIAVEWESNGQPENNYKTTPPVLDSDGSFFLYSKLTVDKSRWQQGNVFSCSVMHEALHNHYTQKSLSLSPGK

SEQ ID NO: 20 - protein, 225 aa, Artificial Sequence
  Synthetic
DKTHTCPPCPAPELLGGPSVFLFPPKPKDTLMISRTPEVTCVVVDVSHEDPEVKFNWYVDGVEVHNAKTKPREEQYNSTYRVVSVLTVLHQDWLNGKEYKCKVSNKALPAPIEKTISKAKGQPREPQVYTLPPSREEMTKNQVSLTCLVKGFYPSDIAVEWESNGQPENNYKTTPPVLDSDGSFFLYSKLTVDKSRWQQGNVFSCSVMHEALHNHYTQKSLSLSP

SEQ ID NO: 21 - protein, 227 aa, Artificial Sequence
  Synthetic
DKTHTCPPCPAPELLGGPSVFLFPPKPKDTLMISRTPEVTCVVVDVSHEDPEVKFNWYVDGVEVHNAKTKPREEQYGSTYRVVSVLTVLHQDWLNGKEYKCKVSNKALPAPIEKTISKAKGQPREPQVYTLPPSREEMTKNQVSLTCLVKGFYPSDIAVEWESNGQPENNYKTTPPVLDSDGSFFLYSKLTVDKSRWQQGNVFSCSVMHEALHNHYTQKSLSLSPGK

SEQ ID NO: 22 - protein, 225 aa, Artificial Sequence
  Synthetic
DKTHTCPPCPAPELLGGPSVFLFPPKPKDTLMISRTPEVTCVVVDVSHEDPEVKFNWYVDGVEVHNAKTKPREEQYGSTYRVVSVLTVLHQDWLNGKEYKCKVSNKALPAPIEKTISKAKGQPREPQVYTLPPSREEMTKNQVSLTCLVKGFYPSDIAVEWESNGQPENNYKTTPPVLDSDGSFFLYSKLTVDKSRWQQGNVFSCSVMHEALHNHYTQKSLSLSP

SEQ ID NO: 23 - protein, 227 aa, Artificial Sequence
  Synthetic
DKTHTCPPCPAPELLGGPSVFLFPPKPKDTLMISRTPEVTCVVVDVSHEDPEVKFNWYVDGVEVHNAKTKPCEEQYNSTYRCVSVLTVLHQDWLNGKEYKCKVSNKALPAPIEKTISKAKGQPREPQVYTLPPSREEMTKNQVSLTCLVKGFYPSDIAVEWESNGQPENNYKTTPPVLDSDGSFFLYSKLTVDKSRWQQGNVFSCSVMHEALHNHYTQKSLSLSPGK

SEQ ID NO: 24 - protein, 225 aa, Artificial Sequence
  Synthetic
DKTHTCPPCPAPELLGGPSVFLFPPKPKDTLMISRTPEVTCVVVDVSHEDPEVKFNWYVDGVEVHNAKTKPCEEQYNSTYRCVSVLTVLHQDWLNGKEYKCKVSNKALPAPIEKTISKAKGQPREPQVYTLPPSREEMTKNQVSLTCLVKGFYPSDIAVEWESNGQPENNYKTTPPVLDSDGSFFLYSKLTVDKSRWQQGNVFSCSVMHEALHNHYTQKSLSLSP

SEQ ID NO: 25 - protein, 484 aa, Artificial Sequence
  Synthetic
DKTHTCPPCPAPELLGGPSVFLFPPKPKDTLMISRTPEVTCVVVDVSHEDPEVKFNWYVDGVEVHNAKTKPCEEQYGSTYRCVSVLTVLHQDWLNGKEYKCKVSNKALPAPIEKTISKAKGQPREPQVYTLPPSREEMTKNQVSLTCLVKGFYPSDIAVEWESNGQPENNYKTTPPVLDSDGSFFLYSKLTVDKSRWQQGNVFSCSVMHEALHNHYTQKSLSLSPGKGGGGSGGGGSGGGGSGGGGSGGGGSGGGGSDKTHTCPPCPAPELLGGPSVFLFPPKPKDTLMISRTPEVTCVVVDVSHEDPEVKFNWYVDGVEVHNAKTKPCEEQYGSTYRCVSVLTVLHQDWLNGKEYKCKVSNKALPAPIEKTISKAKGQPREPQVYTLPPSREEMTKNQVSLTCLVKGFYPSDIAVEWESNGQPENNYKTTPPVLDSDGSFFLYSKLTVDKSRWQQGNVFSCSVMHEALHNHYTQKSLSLSPGK

SEQ ID NO: 26 - protein, 480 aa, Artificial Sequence
  Synthetic
DKTHTCPPCPAPELLGGPSVFLFPPKPKDTLMISRTPEVTCVVVDVSHEDPEVKFNWYVDGVEVHNAKTKPCEEQYGSTYRCVSVLTVLHQDWLNGKEYKCKVSNKALPAPIEKTISKAKGQPREPQVYTLPPSREEMTKNQVSLTCLVKGFYPSDIAVEWESNGQPENNYKTTPPVLDSDGSFFLYSKLTVDKSRWQQGNVFSCSVMHEALHNHYTQKSLSLSPGGGGSGGGGSGGGGSGGGGSGGGGSGGGGSDKTHTCPPCPAPELLGGPSVFLFPPKPKDTLMISRTPEVTCVVVDVSHEDPEVKFNWYVDGVEVHNAKTKPCEEQYGSTYRCVSVLTVLHQDWLNGKEYKCKVSNKALPAPIEKTISKAKGQPREPQVYTLPPSREEMTKNQVSLTCLVKGFYPSDIAVEWESNGQPENNYKTTPPVLDSDGSFFLYSKLTVDKSRWQQGNVFSCSVMHEALHNHYTQKSLSLSP

SEQ ID NO: 27 - protein, 484 aa, Artificial Sequence
  Synthetic
DKTHTCPPCPAPELLGGPSVFLFPPKPKDTLMISRTPEVTCVVVDVSHEDPEVKFNWYVDGVEVHNAKTKPREEQYNSTYRVVSVLTVLHQDWLNGKEYKCKVSNKALPAPIEKTISKAKGQPREPQVYTLPPSREEMTKNQVSLTCLVKGFYPSDIAVEWESNGQPENNYKTTPPVLDSDGSFFLYSKLTVDKSRWQQGNVFSCSVMHEALHNHYTQKSLSLSPGKGGGGSGGGGSGGGGSGGGGSGGGGSGGGGSDKTHTCPPCPAPELLGGPSVFLFPPKPKDTLMISRTPEVTCVVVDVSHEDPEVKFNWYVDGVEVHNAKTKPREEQYNSTYRVVSVLTVLHQDWLNGKEYKCKVSNKALPAPIEKTISKAKGQPREPQVYTLPPSREEMTKNQVSLTCLVKGFYPSDIAVEWESNGQPENNYKTTPPVLDSDGSFFLYSKLTVDKSRWQQGNVFSCSVMHEALHNHYTQKSLSLSPGK

SEQ ID NO: 28 - protein, 480 aa, Artificial Sequence
  Synthetic
DKTHTCPPCPAPELLGGPSVFLFPPKPKDTLMISRTPEVTCVVVDVSHEDPEVKFNWYVDGVEVHNAKTKPREEQYNSTYRVVSVLTVLHQDWLNGKEYKCKVSNKALPAPIEKTISKAKGQPREPQVYTLPPSREEMTKNQVSLTCLVKGFYPSDIAVEWESNGQPENNYKTTPPVLDSDGSFFLYSKLTVDKSRWQQGNVFSCSVMHEALHNHYTQKSLSLSPGGGGSGGGGSGGGGSGGGGSGGGGSGGGGSDKTHTCPPCPAPELLGGPSVFLFPPKPKDTLMISRTPEVTCVVVDVSHEDPEVKFNWYVDGVEVHNAKTKPREEQYNSTYRVVSVLTVLHQDWLNGKEYKCKVSNKALPAPIEKTISKAKGQPREPQVYTLPPSREEMTKNQVSLTCLVKGFYPSDIAVEWESNGQPENNYKTTPPVLDSDGSFFLYSKLTVDKSRWQQGNVFSCSVMHEALHNHYTQKSLSLSP

SEQ ID NO: 29 - protein, 484 aa, Artificial Sequence
  Synthetic
DKTHTCPPCPAPELLGGPSVFLFPPKPKDTLMISRTPEVTCVVVDVSHEDPEVKFNWYVDGVEVHNAKTKPREEQYGSTYRVVSVLTVLHQDWLNGKEYKCKVSNKALPAPIEKTISKAKGQPREPQVYTLPPSREEMTKNQVSLTCLVKGFYPSDIAVEWESNGQPENNYKTTPPVLDSDGSFFLYSKLTVDKSRWQQGNVFSCSVMHEALHNHYTQKSLSLSPGKGGGGSGGGGSGGGGSGGGGSGGGGSGGGGSDKTHTCPPCPAPELLGGPSVFLFPPKPKDTLMISRTPEVTCVVVDVSHEDPEVKFNWYVDGVEVHNAKTKPREEQYGSTYRVVSVLTVLHQDWLNGKEYKCKVSNKALPAPIEKTISKAKGQPREPQVYTLPPSREEMTKNQVSLTCLVKGFYPSDIAVEWESNGQPENNYKTTPPVLDSDGSFFLYSKLTVDKSRWQQGNVFSCSVMHEALHNHYTQKSLSLSPGK

SEQ ID NO: 30 - protein, 480 aa, Artificial Sequence
  Synthetic
DKTHTCPPCPAPELLGGPSVFLFPPKPKDTLMISRTPEVTCVVVDVSHEDPEVKFNWYVDGVEVHNAKTKPREEQYGSTYRVVSVLTVLHQDWLNGKEYKCKVSNKALPAPIEKTISKAKGQPREPQVYTLPPSREEMTKNQVSLTCLVKGFYPSDIAVEWESNGQPENNYKTTPPVLDSDGSFFLYSKLTVDKSRWQQGNVFSCSVMHEALHNHYTQKSLSLSPGGGGSGGGGSGGGGSGGGGSGGGGSGGGGSDKTHTCPPCPAPELLGGPSVFLFPPKPKDTLMISRTPEVTCVVVDVSHEDPEVKFNWYVDGVEVHNAKTKPREEQYGSTYRVVSVLTVLHQDWLNGKEYKCKVSNKALPAPIEKTISKAKGQPREPQVYTLPPSREEMTKNQVSLTCLVKGFYPSDIAVEWESNGQPENNYKTTPPVLDSDGSFFLYSKLTVDKSRWQQGNVFSCSVMHEALHNHYTQKSLSLSP

SEQ ID NO: 31 - protein, 484 aa, Artificial Sequence
  Synthetic
DKTHTCPPCPAPELLGGPSVFLFPPKPKDTLMISRTPEVTCVVVDVSHEDPEVKFNWYVDGVEVHNAKTKPCEEQYNSTYRCVSVLTVLHQDWLNGKEYKCKVSNKALPAPIEKTISKAKGQPREPQVYTLPPSREEMTKNQVSLTCLVKGFYPSDIAVEWESNGQPENNYKTTPPVLDSDGSFFLYSKLTVDKSRWQQGNVFSCSVMHEALHNHYTQKSLSLSPGKGGGGSGGGGSGGGGSGGGGSGGGGSGGGGSDKTHTCPPCPAPELLGGPSVFLFPPKPKDTLMISRTPEVTCVVVDVSHEDPEVKFNWYVDGVEVHNAKTKPCEEQYNSTYRCVSVLTVLHQDWLNGKEYKCKVSNKALPAPIEKTISKAKGQPREPQVYTLPPSREEMTKNQVSLTCLVKGFYPSDIAVEWESNGQPENNYKTTPPVLDSDGSFFLYSKLTVDKSRWQQGNVFSCSVMHEALHNHYTQKSLSLSPGK

SEQ ID NO: 32 - protein, 480 aa, Artificial Sequence
  Synthetic
DKTHTCPPCPAPELLGGPSVFLFPPKPKDTLMISRTPEVTCVVVDVSHEDPEVKFNWYVDGVEVHNAKTKPCEEQYNSTYRCVSVLTVLHQDWLNGKEYKCKVSNKALPAPIEKTISKAKGQPREPQVYTLPPSREEMTKNQVSLTCLVKGFYPSDIAVEWESNGQPENNYKTTPPVLDSDGSFFLYSKLTVDKSRWQQGNVFSCSVMHEALHNHYTQKSLSLSPGGGGSGGGGSGGGGSGGGGSGGGGSGGGGSDKTHTCPPCPAPELLGGPSVFLFPPKPKDTLMISRTPEVTCVVVDVSHEDPEVKFNWYVDGVEVHNAKTKPCEEQYNSTYRCVSVLTVLHQDWLNGKEYKCKVSNKALPAPIEKTISKAKGQPREPQVYTLPPSREEMTKNQVSLTCLVKGFYPSDIAVEWESNGQPENNYKTTPPVLDSDGSFFLYSKLTVDKSRWQQGNVFSCSVMHEALHNHYTQKSLSLSP

SEQ ID NO: 33 - protein, 5 aa, Artificial Sequence
  Synthetic
SYGIS

SEQ ID NO: 34 - protein, 17 aa, Artificial Sequence
  Synthetic
WISAYSGNAIYAQKLQG

SEQ ID NO: 35 - protein, 13 aa, Artificial Sequence
  Synthetic
DPDYYGSGSYSDY

SEQ ID NO: 36 - protein, 11 aa, Artificial Sequence
  Synthetic
RASQSVSSNLA

SEQ ID NO: 37 - protein, 7 aa, Artificial Sequence
  Synthetic
GASSRAT

SEQ ID NO: 38 - protein, 10 aa, Artificial Sequence
  Synthetic
QQYHSWPLLT

SEQ ID NO: 39 - protein, 122 aa, Artificial Sequence
  Synthetic
QVQLVQSGAEVKKPGASVKVSCKASGYTFTSYGISWVRQAPGQCLEWMGWISAYSGNAIYAQKLQGRVTMTRDTSTSTAYMELRSLRSDDTAVYYCARDPDYYGSGSYSDYWGQGTLVTVSS

SEQ ID NO: 40 - protein, 108 aa, Artificial Sequence
  Synthetic
EIVLTQSPATLSVSPGERATLSCRASQSVSSNLAWYQQKPGQAPRLLIYGASSRATGIPARFSGSGSGTEFTLTISSLQSEDFAVYYCQQYHSWPLLTFGCGTKVEIK

SEQ ID NO: 41 - protein, 245 aa, Artificial Sequence
  Synthetic
QVQLVQSGAEVKKPGASVKVSCKASGYTFTSYGISWVRQAPGQCLEWMGWISAYSGNAIYAQKLQGRVTMTRDTSTSTAYMELRSLRSDDTAVYYCARDPDYYGSGSYSDYWGQGTLVTVSSGGGGSGGGGSGGGGSEIVLTQSPATLSVSPGERATLSCRASQSVSSNLAWYQQKPGQAPRLLIYGASSRATGIPARFSGSGSGTEFTLTISSLQSEDFAVYYCQQYHSWPLLTFGCGTKVEIK

SEQ ID NO: 42 - protein, 500 aa, Artificial Sequence
  Synthetic
QVQLVQSGAEVKKPGASVKVSCKASGYTFTSYGISWVRQAPGQCLEWMGWISAYSGNAIYAQKLQGRVTMTRDTSTSTAYMELRSLRSDDTAVYYCARDPDYYGSGSYSDYWGQGTLVTVSSGGGGSGGGGSGGGGSEIVLTQSPATLSVSPGERATLSCRASQSVSSNLAWYQQKPGQAPRLLIYGASSRATGIPARFSGSGSGTEFTLTISSLQSEDFAVYYCQQYHSWPLLTFGCGTKVEIKSGGGGSEVQLVESGGGLVQPGGSLKLSCAASGFTFNKYAMNWVRQAPGKGLEWVARIRSKYNNYATYYADSVKDRFTISRDDSKNTAYLQMNNLKTEDTAVYYCVRHGNFGNSYISYWAYWGQGTLVTVSSGGGGSGGGGSGGGGSQTVVTQEPSLTVSPGGTVTLTCGSSTGAVTSGNYPNWVQQKPGQAPRGLIGGTKFLAPGTPARFSGSLLGGKAALTLSGVQPEDEAEYYCVLWYSNRWVFGGGTKLTVL

SEQ ID NO: 43 - protein, 988 aa, Artificial Sequence
  Synthetic
QVQLVQSGAEVKKPGASVKVSCKASGYTFTSYGISWVRQAPGQCLEWMGWISAYSGNAIYAQKLQGRVTMTRDTSTSTAYMELRSLRSDDTAVYYCARDPDYYGSGSYSDYWGQGTLVTVSSGGGGSGGGGSGGGGSEIVLTQSPATLSVSPGERATLSCRASQSVSSNLAWYQQKPGQAPRLLIYGASSRATGIPARFSGSGSGTEFTLTISSLQSEDFAVYYCQQYHSWPLLTFGCGTKVEIKSGGGGSEVQLVESGGGLVQPGGSLKLSCAASGFTFNKYAMNWVRQAPGKGLEWVARIRSKYNNYATYYADSVKDRFTISRDDSKNTAYLQMNNLKTEDTAVYYCVRHGNFGNSYISYWAYWGQGTLVTVSSGGGGSGGGGSGGGGSQTVVTQEPSLTVSPGGTVTLTCGSSTGAVTSGNYPNWVQQKPGQAPRGLIGGTKFLAPGTPARFSGSLLGGKAALTLSGVQPEDEAEYYCVLWYSNRWVFGGGTKLTVLGGGGDKTHTCPPCPAPELLGGPSVFLFPPKPKDTLMISRTPEVTCVVVDVSHEDPEVKFNWYVDGVEVHNAKTKPCEEQYGSTYRCVSVLTVLHQDWLNGKEYKCKVSNKALPAPIEKTISKAKGQPREPQVYTLPPSREEMTKNQVSLTCLVKGFYPSDIAVEWESNGQPENNYKTTPPVLDSDGSFFLYSKLTVDKSRWQQGNVFSCSVMHEALHNHYTQKSLSLSPGKGGGGSGGGGSGGGGSGGGGSGGGGSGGGGSDKTHTCPPCPAPELLGGPSVFLFPPKPKDTLMISRTPEVTCVVVDVSHEDPEVKFNWYVDGVEVHNAKTKPCEEQYGSTYRCVSVLTVLHQDWLNGKEYKCKVSNKALPAPIEKTISKAKGQPREPQVYTLPPSREEMTKNQVSLTCLVKGFYPSDIAVEWESNGQPENNYKTTPPVLDSDGSFFLYSKLTVDKSRWQQGNVFSCSVMHEALHNHYTQKSLSLSPGK

SEQ ID NO: 44 - protein, 5 aa, Artificial Sequence
  Synthetic
SYWMH

SEQ ID NO: 45 - protein, 17 aa, Artificial Sequence
  Synthetic
YITPSTGYTEYNQKFKG

SEQ ID NO: 46 - protein, 10 aa, Artificial Sequence
  Synthetic
VHDYDRAMEY

SEQ ID NO: 47 - protein, 11 aa, Artificial Sequence
  Synthetic
KASQDINKYIA

SEQ ID NO: 48 - protein, 7 aa, Artificial Sequence
  Synthetic
YTSTLQP

SEQ ID NO: 49 - protein, 9 aa, Artificial Sequence
  Synthetic
LQYASYPFT

SEQ ID NO: 50 - protein, 119 aa, Artificial Sequence
  Synthetic
QVQLVQSGAEVKKPGASVKVSCKASGYTFTSYWMHWVRQAPGQCLEWIGYITPSTGYTEYNQKFKGRVTMTRDKSTSTVYMELSSLTSEDTAVYYCARVHDYDRAMEYWGQGTTVTVSS

SEQ ID NO: 51 - protein, 107 aa, Artificial Sequence
  Synthetic
DIQMTQSPSSLSASVGDRVTITCKASQDINKYIAWYQQKPGKGPKLLIYYTSTLQPGVPSRFSGSGSGTDFTFTISSLQPEDIATYYCLQYASYPFTFGCGTRLEIK

SEQ ID NO: 52 - protein, 241 aa, Artificial Sequence
  Synthetic
QVQLVQSGAEVKKPGASVKVSCKASGYTFTSYWMHWVRQAPGQCLEWIGYITPSTGYTEYNQKFKGRVTMTRDKSTSTVYMELSSLTSEDTAVYYCARVHDYDRAMEYWGQGTTVTVSSGGGGSGGGGSGGGGSDIQMTQSPSSLSASVGDRVTITCKASQDINKYIAWYQQKPGKGPKLLIYYTSTLQPGVPSRFSGSGSGTDFTFTISSLQPEDIATYYCLQYASYPFTFGCGTRLEIK

SEQ ID NO: 53 - protein, 496 aa, Artificial Sequence
  Synthetic
QVQLVQSGAEVKKPGASVKVSCKASGYTFTSYWMHWVRQAPGQCLEWIGYITPSTGYTEYNQKFKGRVTMTRDKSTSTVYMELSSLTSEDTAVYYCARVHDYDRAMEYWGQGTTVTVSSGGGGSGGGGSGGGGSDIQMTQSPSSLSASVGDRVTITCKASQDINKYIAWYQQKPGKGPKLLIYYTSTLQPGVPSRFSGSGSGTDFTFTISSLQPEDIATYYCLQYASYPFTFGCGTRLEIKSGGGGSEVQLVESGGGLVQPGGSLKLSCAASGFTFNKYAMNWVRQAPGKGLEWVARIRSKYNNYATYYADSVKDRFTISRDDSKNTAYLQMNNLKTEDTAVYYCVRHGNFGNSYISYWAYWGQGTLVTVSSGGGGSGGGGSGGGGSQTVVTQEPSLTVSPGGTVTLTCGSSTGAVTSGNYPNWVQQKPGQAPRGLIGGTKFLAPGTPARFSGSLLGGKAALTLSGVQPEDEAEYYCVLWYSNRWVFGGGTKLTVL

SEQ ID NO: 54 - protein, 984 aa, Artificial Sequence
  Synthetic
QVQLVQSGAEVKKPGASVKVSCKASGYTFTSYWMHWVRQAPGQCLEWIGYITPSTGYTEYNQKFKGRVTMTRDKSTSTVYMELSSLTSEDTAVYYCARVHDYDRAMEYWGQGTTVTVSSGGGGSGGGGSGGGGSDIQMTQSPSSLSASVGDRVTITCKASQDINKYIAWYQQKPGKGPKLLIYYTSTLQPGVPSRFSGSGSGTDFTFTISSLQPEDIATYYCLQYASYPFTFGCGTRLEIKSGGGGSEVQLVESGGGLVQPGGSLKLSCAASGFTFNKYAMNWVRQAPGKGLEWVARIRSKYNNYATYYADSVKDRFTISRDDSKNTAYLQMNNLKTEDTAVYYCVRHGNFGNSYISYWAYWGQGTLVTVSSGGGGSGGGGSGGGGSQTVVTQEPSLTVSPGGTVTLTCGSSTGAVTSGNYPNWVQQKPGQAPRGLIGGTKFLAPGTPARFSGSLLGGKAALTLSGVQPEDEAEYYCVLWYSNRWVFGGGTKLTVLGGGGDKTHTCPPCPAPELLGGPSVFLFPPKPKDTLMISRTPEVTCVVVDVSHEDPEVKFNWYVDGVEVHNAKTKPCEEQYGSTYRCVSVLTVLHQDWLNGKEYKCKVSNKALPAPIEKTISKAKGQPREPQVYTLPPSREEMTKNQVSLTCLVKGFYPSDIAVEWESNGQPENNYKTTPPVLDSDGSFFLYSKLTVDKSRWQQGNVFSCSVMHEALHNHYTQKSLSLSPGKGGGGSGGGGSGGGGSGGGGSGGGGSGGGGSDKTHTCPPCPAPELLGGPSVFLFPPKPKDTLMISRTPEVTCVVVDVSHEDPEVKFNWYVDGVEVHNAKTKPCEEQYGSTYRCVSVLTVLHQDWLNGKEYKCKVSNKALPAPIEKTISKAKGQPREPQVYTLPPSREEMTKNQVSLTCLVKGFYPSDIAVEWESNGQPENNYKTTPPVLDSDGSFFLYSKLTVDKSRWQQGNVFSCSVMHEALHNHYTQKSLSLSPGK

SEQ ID NO: 55 - protein, 492 aa, Artificial Sequence
  Synthetic
QVQLVQSGAEVKKPGASVKVSCKASGYTFTSYWMHWVRQAPGQCLEWIGYITPSTGYTEYNQKFKGRVTMTRDKSTSTVYMELSSLTSEDTAVYYCARVHDYDRAMEYWGQGTTVTVSSGGGGSGGGGSGGGGSDIQMTQSPSSLSASVGDRVTITCKASQDINKYIAWYQQKPGKGPKLLIYYTSTLQPGVPSRFSGSGSGTDFTFTISSLQPEDIATYYCLQYASYPFTFGCGTRLEIKSGGGGSQVQLVQSGAEVKKPGASVKVSCKASGYTFTSYGISWVRQAPGQCLEWMGWISAYSGNAIYAQKLQGRVTMTRDTSTSTAYMELRSLRSDDTAVYYCARDPDYYGSGSYSDYWGQGTLVTVSSGGGGSGGGGSGGGGSEIVLTQSPATLSVSPGERATLSCRASQSVSSNLAWYQQKPGQAPRLLIYGASSRATGIPARFSGSGSGTEFTLTISSLQSEDFAVYYCQQYHSWPLLTFGCGTKVEIK

SEQ ID NO: 56 - protein, 747 aa, Artificial Sequence
  Synthetic
QVQLVQSGAEVKKPGASVKVSCKASGYTFTSYWMHWVRQAPGQCLEWIGYITPSTGYTEYNQKFKGRVTMTRDKSTSTVYMELSSLTSEDTAVYYCARVHDYDRAMEYWGQGTTVTVSSGGGGSGGGGSGGGGSDIQMTQSPSSLSASVGDRVTITCKASQDINKYIAWYQQKPGKGPKLLIYYTSTLQPGVPSRFSGSGSGTDFTFTISSLQPEDIATYYCLQYASYPFTFGCGTRLEIKSGGGGSQVQLVQSGAEVKKPGASVKVSCKASGYTFTSYGISWVRQAPGQCLEWMGWISAYSGNAIYAQKLQGRVTMTRDTSTSTAYMELRSLRSDDTAVYYCARDPDYYGSGSYSDYWGQGTLVTVSSGGGGSGGGGSGGGGSEIVLTQSPATLSVSPGERATLSCRASQSVSSNLAWYQQKPGQAPRLLIYGASSRATGIPARFSGSGSGTEFTLTISSLQSEDFAVYYCQQYHSWPLLTFGCGTKVEIKSGGGGSEVQLVESGGGLVQPGGSLKLSCAASGFTFNKYAMNWVRQAPGKGLEWVARIRSKYNNYATYYADSVKDRFTISRDDSKNTAYLQMNNLKTEDTAVYYCVRHGNFGNSYISYWAYWGQGTLVTVSSGGGGSGGGGSGGGGSQTVVTQEPSLTVSPGGTVTLTCGSSTGAVTSGNYPNWVQQKPGQAPRGLIGGTKFLAPGTPARFSGSLLGGKAALTLSGVQPEDEAEYYCVLWYSNRWVFGGGTKLTVL

SEQ ID NO: 57 - protein, 1235 aa, Artificial Sequence
  Synthetic
QVQLVQSGAEVKKPGASVKVSCKASGYTFTSYWMHWVRQAPGQCLEWIGYITPSTGYTEYNQKFKGRVTMTRDKSTSTVYMELSSLTSEDTAVYYCARVHDYDRAMEYWGQGTTVTVSSGGGGSGGGGSGGGGSDIQMTQSPSSLSASVGDRVTITCKASQDINKYIAWYQQKPGKGPKLLIYYTSTLQPGVPSRFSGSGSGTDFTFTISSLQPEDIATYYCLQYASYPFTFGCGTRLEIKSGGGGSQVQLVQSGAEVKKPGASVKVSCKASGYTFTSYGISWVRQAPGQCLEWMGWISAYSGNAIYAQKLQGRVTMTRDTSTSTAYMELRSLRSDDTAVYYCARDPDYYGSGSYSDYWGQGTLVTVSSGGGGSGGGGSGGGGSEIVLTQSPATLSVSPGERATLSCRASQSVSSNLAWYQQKPGQAPRLLIYGASSRATGIPARFSGSGSGTEFTLTISSLQSEDFAVYYCQQYHSWPLLTFGCGTKVEIKSGGGGSEVQLVESGGGLVQPGGSLKLSCAASGFTFNKYAMNWVRQAPGKGLEWVARIRSKYNNYATYYADSVKDRFTISRDDSKNTAYLQMNNLKTEDTAVYYCVRHGNFGNSYISYWAYWGQGTLVTVSSGGGGSGGGGSGGGGSQTVVTQEPSLTVSPGGTVTLTCGSSTGAVTSGNYPNWVQQKPGQAPRGLIGGTKFLAPGTPARFSGSLLGGKAALTLSGVQPEDEAEYYCVLWYSNRWVFGGGTKLTVLGGGGDKTHTCPPCPAPELLGGPSVFLFPPKPKDTLMISRTPEVTCVVVDVSHEDPEVKFNWYVDGVEVHNAKTKPCEEQYGSTYRCVSVLTVLHQDWLNGKEYKCKVSNKALPAPIEKTISKAKGQPREPQVYTLPPSREEMTKNQVSLTCLVKGFYPSDIAVEWESNGQPENNYKTTPPVLDSDGSFFLYSKLTVDKSRWQQGNVFSCSVMHEALHNHYTQKSLSLSPGKGGGGSGGGGSGGGGSGGGGSGGGGSGGGGSDKTHTCPPCPAPELLGGPSVFLFPPKPKDTLMISRTPEVTCVVVDVSHEDPEVKFNWYVDGVEVHNAKTKPCEEQYGSTYRCVSVLTVLHQDWLNGKEYKCKVSNKALPAPIEKTISKAKGQPREPQVYTLPPSREEMTKNQVSLTCLVKGFYPSDIAVEWESNGQPENNYKTTPPVLDSDGSFFLYSKLTVDKSRWQQGNVFSCSVMHEALHNHYTQKSLSLSPGK

SEQ ID NO: 58 - protein, 5 aa, Artificial Sequence
  Synthetic
DYAMH

SEQ ID NO: 59 - protein, 17 aa, Artificial Sequence
  Synthetic
GIAWNSDSIGYADSVKG

SEQ ID NO: 60 - protein, 14 aa, Artificial Sequence
  Synthetic
DTLYGSGSPRAFDI

SEQ ID NO: 61 - protein, 11 aa, Artificial Sequence
  Synthetic
RASQSVNNNLA

SEQ ID NO: 62 - protein, 7 aa, Artificial Sequence
  Synthetic
GASTRAT

SEQ ID NO: 63 - protein, 9 aa, Artificial Sequence
  Synthetic
QQSNNWPIT

SEQ ID NO: 64 - protein, 123 aa, Artificial Sequence
  Synthetic
EVQLVESGGGLVQPDRSLRLSCAASGFTFRDYAMHWVRQAPGKCLEWVSGIAWNSDSIGYADSVKGRFTISRDNAKNSLFLQMHSLRPEDTALYFCAKDTLYGSGSPRAFDIWGQGTMVTVSS

SEQ ID NO: 65 - protein, 107 aa, Artificial Sequence
  Synthetic
EIVLTQSPATLSVSPGERATLSCRASQSVNNNLAWYQQKPGQAPRLLIYGASTRATGIPARFSGSGSGTEFTLTISRLEPEDFAVYYCQQSNNWPITFGCGTRLEIK

SEQ ID NO: 66 - protein, 245 aa, Artificial Sequence
  Synthetic
EVQLVESGGGLVQPDRSLRLSCAASGFTFRDYAMHWVRQAPGKCLEWVSGIAWNSDSIGYADSVKGRFTISRDNAKNSLFLQMHSLRPEDTALYFCAKDTLYGSGSPRAFDIWGQGTMVTVSSGGGGSGGGGSGGGGSEIVLTQSPATLSVSPGERATLSCRASQSVNNNLAWYQQKPGQAPRLLIYGASTRATGIPARFSGSGSGTEFTLTISRLEPEDFAVYYCQQSNNWPITFGCGTRLEIK

SEQ ID NO: 67 - protein, 500 aa, Artificial Sequence
  Synthetic
EVQLVESGGGLVQPDRSLRLSCAASGFTFRDYAMHWVRQAPGKCLEWVSGIAWNSDSIGYADSVKGRFTISRDNAKNSLFLQMHSLRPEDTALYFCAKDTLYGSGSPRAFDIWGQGTMVTVSSGGGGSGGGGSGGGGSEIVLTQSPATLSVSPGERATLSCRASQSVNNNLAWYQQKPGQAPRLLIYGASTRATGIPARFSGSGSGTEFTLTISRLEPEDFAVYYCQQSNNWPITFGCGTRLEIKSGGGGSEVQLVESGGGLVQPGGSLKLSCAASGFTFNKYAMNWVRQAPGKGLEWVARIRSKYNNYATYYADSVKDRFTISRDDSKNTAYLQMNNLKTEDTAVYYCVRHGNFGNSYISYWAYWGQGTLVTVSSGGGGSGGGGSGGGGSQTVVTQEPSLTVSPGGTVTLTCGSSTGAVTSGNYPNWVQQKPGQAPRGLIGGTKFLAPGTPARFSGSLLGGKAALTLSGVQPEDEAEYYCVLWYSNRWVFGGGTKLTVL

SEQ ID NO: 68 - protein, 500 aa, Artificial Sequence
  Synthetic
EVQLVESGGGLVQPDRSLRLSCAASGFTFRDYAMHWVRQAPGKCLEWVSGIAWNSDSIGYADSVKGRFTISRDNAKNSLFLQMHSLRPEDTALYFCAKDTLYGSGSPRAFDIWGQGTMVTVSSGGGGSGGGGSGGGGSEIVLTQSPATLSVSPGERATLSCRASQSVNNNLAWYQQKPGQAPRLLIYGASTRATGIPARFSGSGSGTEFTLTISRLEPEDFAVYYCQQSNNWPITFGCGTRLEIKSGGGGSEVQLVESGGGLVQPGGSLKLSCAASGFTFNKYAINWVRQAPGKGLEWVARIRSKYNNYATYYADAVKDRFTISRDDSKNTVYLQMNNLKTEDTAVYYCARAGNFGSSYISYWAYWGQGTLVTVSSGGGGSGGGGSGGGGSQTVVTQEPSLTVSPGGTVTITCGSSTGAVTSGNYPNWVQKKPGQAPRGLIGGTKFLAPGTPARFSGSLSGGKAALTLSGVQPEDEAEYYCVLWYSNRWVFGSGTKLTVL

SEQ ID NO: 69 - protein, 988 aa, Artificial Sequence
  Synthetic
EVQLVESGGGLVQPDRSLRLSCAASGFTFRDYAMHWVRQAPGKCLEWVSGIAWNSDSIGYADSVKGRFTISRDNAKNSLFLQMHSLRPEDTALYFCAKDTLYGSGSPRAFDIWGQGTMVTVSSGGGGSGGGGSGGGGSEIVLTQSPATLSVSPGERATLSCRASQSVNNNLAWYQQKPGQAPRLLIYGASTRATGIPARFSGSGSGTEFTLTISRLEPEDFAVYYCQQSNNWPITFGCGTRLEIKSGGGGSEVQLVESGGGLVQPGGSLKLSCAASGFTFNKYAMNWVRQAPGKGLEWVARIRSKYNNYATYYADSVKDRFTISRDDSKNTAYLQMNNLKTEDTAVYYCVRHGNFGNSYISYWAYWGQGTLVTVSSGGGGSGGGGSGGGGSQTVVTQEPSLTVSPGGTVTLTCGSSTGAVTSGNYPNWVQQKPGQAPRGLIGGTKFLAPGTPARFSGSLLGGKAALTLSGVQPEDEAEYYCVLWYSNRWVFGGGTKLTVLGGGGDKTHTCPPCPAPELLGGPSVFLFPPKPKDTLMISRTPEVTCVVVDVSHEDPEVKFNWYVDGVEVHNAKTKPCEEQYGSTYRCVSVLTVLHQDWLNGKEYKCKVSNKALPAPIEKTISKAKGQPREPQVYTLPPSREEMTKNQVSLTCLVKGFYPSDIAVEWESNGQPENNYKTTPPVLDSDGSFFLYSKLTVDKSRWQQGNVFSCSVMHEALHNHYTQKSLSLSPGKGGGGSGGGGSGGGGSGGGGSGGGGSGGGGSDKTHTCPPCPAPELLGGPSVFLFPPKPKDTLMISRTPEVTCVVVDVSHEDPEVKFNWYVDGVEVHNAKTKPCEEQYGSTYRCVSVLTVLHQDWLNGKEYKCKVSNKALPAPIEKTISKAKGQPREPQVYTLPPSREEMTKNQVSLTCLVKGFYPSDIAVEWESNGQPENNYKTTPPVLDSDGSFFLYSKLTVDKSRWQQGNVFSCSVMHEALHNHYTQKSLSLSPGK

SEQ ID NO: 70 - protein, 988 aa, Artificial Sequence
  Synthetic
EVQLVESGGGLVQPDRSLRLSCAASGFTFRDYAMHWVRQAPGKCLEWVSGIAWNSDSIGYADSVKGRFTISRDNAKNSLFLQMHSLRPEDTALYFCAKDTLYGSGSPRAFDIWGQGTMVTVSSGGGGSGGGGSGGGGSEIVLTQSPATLSVSPGERATLSCRASQSVNNNLAWYQQKPGQAPRLLIYGASTRATGIPARFSGSGSGTEFTLTISRLEPEDFAVYYCQQSNNWPITFGCGTRLEIKSGGGGSEVQLVESGGGLVQPGGSLKLSCAASGFTFNKYAINWVRQAPGKGLEWVARIRSKYNNYATYYADAVKDRFTISRDDSKNTVYLQMNNLKTEDTAVYYCARAGNFGSSYISYWAYWGQGTLVTVSSGGGGSGGGGSGGGGSQTVVTQEPSLTVSPGGTVTITCGSSTGAVTSGNYPNWVQKKPGQAPRGLIGGTKFLAPGTPARFSGSLSGGKAALTLSGVQPEDEAEYYCVLWYSNRWVFGSGTKLTVLGGGGDKTHTCPPCPAPELLGGPSVFLFPPKPKDTLMISRTPEVTCVVVDVSHEDPEVKFNWYVDGVEVHNAKTKPCEEQYGSTYRCVSVLTVLHQDWLNGKEYKCKVSNKALPAPIEKTISKAKGQPREPQVYTLPPSREEMTKNQVSLTCLVKGFYPSDIAVEWESNGQPENNYKTTPPVLDSDGSFFLYSKLTVDKSRWQQGNVFSCSVMHEALHNHYTQKSLSLSPGKGGGGSGGGGSGGGGSGGGGSGGGGSGGGGSDKTHTCPPCPAPELLGGPSVFLFPPKPKDTLMISRTPEVTCVVVDVSHEDPEVKFNWYVDGVEVHNAKTKPCEEQYGSTYRCVSVLTVLHQDWLNGKEYKCKVSNKALPAPIEKTISKAKGQPREPQVYTLPPSREEMTKNQVSLTCLVKGFYPSDIAVEWESNGQPENNYKTTPPVLDSDGSFFLYSKLTVDKSRWQQGNVFSCSVMHEALHNHYTQKSLSLSPGK

SEQ ID NO: 71 - protein, 5 aa, Artificial Sequence
  Synthetic
GHAMT

SEQ ID NO: 72 - protein, 17 aa, Artificial Sequence
  Synthetic
TIYGSGGYTYYAGSVKG

SEQ ID NO: 73 - protein, 10 aa, Artificial Sequence
  Synthetic
VGGYDWYFDL

SEQ ID NO: 74 - protein, 11 aa, Artificial Sequence
  Synthetic
GGHNIGSKNVH

SEQ ID NO: 75 - protein, 7 aa, Artificial Sequence
  Synthetic
RDTNRPS

SEQ ID NO: 76 - protein, 9 aa, Artificial Sequence
  Synthetic
QLWDSTTVV

SEQ ID NO: 77 - protein, 119 aa, Artificial Sequence
  Synthetic
EVQLLESGGGLVQPGGSLRLSCAASGFTFSGHAMTWVRQAPGKCLEWLSTIYGSGGYTYYAGSVKGRFTISRDNSKNTLYLQMNSLRAEDTAVYYCAKVGGYDWYFDLWGRGTLVTVSS

SEQ ID NO: 78 - protein, 106 aa, Artificial Sequence
  Synthetic
SYELTQPPSVSVALGQTARITCGGHNIGSKNVHWYQQKPGQAPVLVIYRDTNRPSGIPERFSGSNSGNTATLTISRAQAGDEADYYCQLWDSTTVVFGCGTKLTVL

SEQ ID NO: 79 - protein, 240 aa, Artificial Sequence
  Synthetic
EVQLLESGGGLVQPGGSLRLSCAASGFTFSGHAMTWVRQAPGKCLEWLSTIYGSGGYTYYAGSVKGRFTISRDNSKNTLYLQMNSLRAEDTAVYYCAKVGGYDWYFDLWGRGTLVTVSSGGGGSGGGGSGGGGSSYELTQPPSVSVALGQTARITCGGHNIGSKNVHWYQQKPGQAPVLVIYRDTNRPSGIPERFSGSNSGNTATLTISRAQAGDEADYYCQLWDSTTVVFGCGTKLTVL

SEQ ID NO: 80 - protein, 495 aa, Artificial Sequence
  Synthetic
EVQLLESGGGLVQPGGSLRLSCAASGFTFSGHAMTWVRQAPGKCLEWLSTIYGSGGYTYYAGSVKGRFTISRDNSKNTLYLQMNSLRAEDTAVYYCAKVGGYDWYFDLWGRGTLVTVSSGGGGSGGGGSGGGGSSYELTQPPSVSVALGQTARITCGGHNIGSKNVHWYQQKPGQAPVLVIYRDTNRPSGIPERFSGSNSGNTATLTISRAQAGDEADYYCQLWDSTTVVFGCGTKLTVLSGGGGSEVQLVESGGGLVQPGGSLKLSCAASGFTFNKYAMNWVRQAPGKGLEWVARIRSKYNNYATYYADSVKDRFTISRDDSKNTAYLQMNNLKTEDTAVYYCVRHGNFGNSYISYWAYWGQGTLVTVSSGGGGSGGGGSGGGGSQTVVTQEPSLTVSPGGTVTLTCGSSTGAVTSGNYPNWVQQKPGQAPRGLIGGTKFLAPGTPARFSGSLLGGKAALTLSGVQPEDEAEYYCVLWYSNRWVFGGGTKLTVL

SEQ ID NO: 81 - protein, 495 aa, Artificial Sequence
  Synthetic
EVQLLESGGGLVQPGGSLRLSCAASGFTFSGHAMTWVRQAPGKCLEWLSTIYGSGGYTYYAGSVKGRFTISRDNSKNTLYLQMNSLRAEDTAVYYCAKVGGYDWYFDLWGRGTLVTVSSGGGGSGGGGSGGGGSSYELTQPPSVSVALGQTARITCGGHNIGSKNVHWYQQKPGQAPVLVIYRDTNRPSGIPERFSGSNSGNTATLTISRAQAGDEADYYCQLWDSTTVVFGCGTKLTVLSGGGGSEVQLVESGGGLVQPGGSLKLSCAASGFTFNKYAINWVRQAPGKGLEWVARIRSKYNNYATYYADAVKDRFTISRDDSKNTVYLQMNNLKTEDTAVYYCARAGNFGSSYISYWAYWGQGTLVTVSSGGGGSGGGGSGGGGSQTVVTQEPSLTVSPGGTVTITCGSSTGAVTSGNYPNWVQKKPGQAPRGLIGGTKFLAPGTPARFSGSLSGGKAALTLSGVQPEDEAEYYCVLWYSNRWVFGSGTKLTVL

SEQ ID NO: 82 - protein, 983 aa, Artificial Sequence
  Synthetic
EVQLLESGGGLVQPGGSLRLSCAASGFTFSGHAMTWVRQAPGKCLEWLSTIYGSGGYTYYAGSVKGRFTISRDNSKNTLYLQMNSLRAEDTAVYYCAKVGGYDWYFDLWGRGTLVTVSSGGGGSGGGGSGGGGSSYELTQPPSVSVALGQTARITCGGHNIGSKNVHWYQQKPGQAPVLVIYRDTNRPSGIPERFSGSNSGNTATLTISRAQAGDEADYYCQLWDSTTVVFGCGTKLTVLSGGGGSEVQLVESGGGLVQPGGSLKLSCAASGFTFNKYAMNWVRQAPGKGLEWVARIRSKYNNYATYYADSVKDRFTISRDDSKNTAYLQMNNLKTEDTAVYYCVRHGNFGNSYISYWAYWGQGTLVTVSSGGGGSGGGGSGGGGSQTVVTQEPSLTVSPGGTVTLTCGSSTGAVTSGNYPNWVQQKPGQAPRGLIGGTKFLAPGTPARFSGSLLGGKAALTLSGVQPEDEAEYYCVLWYSNRWVFGGGTKLTVLGGGGDKTHTCPPCPAPELLGGPSVFLFPPKPKDTLMISRTPEVTCVVVDVSHEDPEVKFNWYVDGVEVHNAKTKPCEEQYGSTYRCVSVLTVLHQDWLNGKEYKCKVSNKALPAPIEKTISKAKGQPREPQVYTLPPSREEMTKNQVSLTCLVKGFYPSDIAVEWESNGQPENNYKTTPPVLDSDGSFFLYSKLTVDKSRWQQGNVFSCSVMHEALHNHYTQKSLSLSPGKGGGGSGGGGSGGGGSGGGGSGGGGSGGGGSDKTHTCPPCPAPELLGGPSVFLFPPKPKDTLMISRTPEVTCVVVDVSHEDPEVKFNWYVDGVEVHNAKTKPCEEQYGSTYRCVSVLTVLHQDWLNGKEYKCKVSNKALPAPIEKTISKAKGQPREPQVYTLPPSREEMTKNQVSLTCLVKGFYPSDIAVEWESNGQPENNYKTTPPVLDSDGSFFLYSKLTVDKSRWQQGNVFSCSVMHEALHNHYTQKSLSLSPGK

SEQ ID NO: 83 - protein, 983 aa, Artificial Sequence
  Synthetic
EVQLLESGGGLVQPGGSLRLSCAASGFTFSGHAMTWVRQAPGKCLEWLSTIYGSGGYTYYAGSVKGRFTISRDNSKNTLYLQMNSLRAEDTAVYYCAKVGGYDWYFDLWGRGTLVTVSSGGGGSGGGGSGGGGSSYELTQPPSVSVALGQTARITCGGHNIGSKNVHWYQQKPGQAPVLVIYRDTNRPSGIPERFSGSNSGNTATLTISRAQAGDEADYYCQLWDSTTVVFGCGTKLTVLSGGGGSEVQLVESGGGLVQPGGSLKLSCAASGFTFNKYAINWVRQAPGKGLEWVARIRSKYNNYATYYADAVKDRFTISRDDSKNTVYLQMNNLKTEDTAVYYCARAGNFGSSYISYWAYWGQGTLVTVSSGGGGSGGGGSGGGGSQTVVTQEPSLTVSPGGTVTITCGSSTGAVTSGNYPNWVQKKPGQAPRGLIGGTKFLAPGTPARFSGSLSGGKAALTLSGVQPEDEAEYYCVLWYSNRWVFGSGTKLTVLGGGGDKTHTCPPCPAPELLGGPSVFLFPPKPKDTLMISRTPEVTCVVVDVSHEDPEVKFNWYVDGVEVHNAKTKPCEEQYGSTYRCVSVLTVLHQDWLNGKEYKCKVSNKALPAPIEKTISKAKGQPREPQVYTLPPSREEMTKNQVSLTCLVKGFYPSDIAVEWESNGQPENNYKTTPPVLDSDGSFFLYSKLTVDKSRWQQGNVFSCSVMHEALHNHYTQKSLSLSPGKGGGGSGGGGSGGGGSGGGGSGGGGSGGGGSDKTHTCPPCPAPELLGGPSVFLFPPKPKDTLMISRTPEVTCVVVDVSHEDPEVKFNWYVDGVEVHNAKTKPCEEQYGSTYRCVSVLTVLHQDWLNGKEYKCKVSNKALPAPIEKTISKAKGQPREPQVYTLPPSREEMTKNQVSLTCLVKGFYPSDIAVEWESNGQPENNYKTTPPVLDSDGSFFLYSKLTVDKSRWQQGNVFSCSVMHEALHNHYTQKSLSLSPGK

SEQ ID NO: 84 - protein, 5 aa, Artificial Sequence
  Synthetic
DYTMH

SEQ ID NO: 85 - protein, 17 aa, Artificial Sequence
  Synthetic
GIGWNGYSKGYADSVKG

SEQ ID NO: 86 - protein, 17 aa, Artificial Sequence
  Synthetic
DYHYGSGILDNYYGLDV

SEQ ID NO: 87 - protein, 11 aa, Artificial Sequence
  Synthetic
RASQSISNNLA

SEQ ID NO: 88 - protein, 7 aa, Artificial Sequence
  Synthetic
GASSRAT

SEQ ID NO: 89 - protein, 9 aa, Artificial Sequence
  Synthetic
QQYKNWPLT

SEQ ID NO: 90 - protein, 126 aa, Artificial Sequence
  Synthetic
EVQLVESGGGLVQPGGSLTLSCAASGFTFHDYTMHWVRQTPGKCLEWLSGIGWNGYSKGYADSVKGRFTISRDNAKNSLFLQMNSLTSDDTALYYCVKDYHYGSGILDNYYGLDVWGQGTTVTVSS

SEQ ID NO: 91 - protein, 107 aa, Artificial Sequence
  Synthetic
EIVLTQSPATLSVSPGERATLSCRASQSISNNLAWYQQKPGQAPRLLIYGASSRATGIPDRFSGSGSGTEFTLTISSLQSEDFAVYYCQQYKNWPLTFGCGTKVDIK

SEQ ID NO: 92 - protein, 248 aa, Artificial Sequence
  Synthetic
EVQLVESGGGLVQPGGSLTLSCAASGFTFHDYTMHWVRQTPGKCLEWLSGIGWNGYSKGYADSVKGRFTISRDNAKNSLFLQMNSLTSDDTALYYCVKDYHYGSGILDNYYGLDVWGQGTTVTVSSGGGGSGGGGSGGGGSEIVLTQSPATLSVSPGERATLSCRASQSISNNLAWYQQKPGQAPRLLIYGASSRATGIPDRFSGSGSGTEFTLTISSLQSEDFAVYYCQQYKNWPLTFGCGTKVDIK

SEQ ID NO: 93 - protein, 503 aa, Artificial Sequence
  Synthetic
EVQLVESGGGLVQPGGSLTLSCAASGFTFHDYTMHWVRQTPGKCLEWLSGIGWNGYSKGYADSVKGRFTISRDNAKNSLFLQMNSLTSDDTALYYCVKDYHYGSGILDNYYGLDVWGQGTTVTVSSGGGGSGGGGSGGGGSEIVLTQSPATLSVSPGERATLSCRASQSISNNLAWYQQKPGQAPRLLIYGASSRATGIPDRFSGSGSGTEFTLTISSLQSEDFAVYYCQQYKNWPLTFGCGTKVDIKSGGGGSEVQLVESGGGLVQPGGSLKLSCAASGFTFNKYAMNWVRQAPGKGLEWVARIRSKYNNYATYYADSVKDRFTISRDDSKNTAYLQMNNLKTEDTAVYYCVRHGNFGNSYISYWAYWGQGTLVTVSSGGGGSGGGGSGGGGSQTVVTQEPSLTVSPGGTVTLTCGSSTGAVTSGNYPNWVQQKPGQAPRGLIGGTKFLAPGTPARFSGSLLGGKAALTLSGVQPEDEAEYYCVLWYSNRWVFGGGTKLTVL

SEQ ID NO: 94 - protein, 503 aa, Artificial Sequence
  Synthetic
EVQLVESGGGLVQPGGSLTLSCAASGFTFHDYTMHWVRQTPGKCLEWLSGIGWNGYSKGYADSVKGRFTISRDNAKNSLFLQMNSLTSDDTALYYCVKDYHYGSGILDNYYGLDVWGQGTTVTVSSGGGGSGGGGSGGGGSEIVLTQSPATLSVSPGERATLSCRASQSISNNLAWYQQKPGQAPRLLIYGASSRATGIPDRFSGSGSGTEFTLTISSLQSEDFAVYYCQQYKNWPLTFGCGTKVDIKSGGGGSEVQLVESGGGLVQPGGSLKLSCAASGFTFNKYAINWVRQAPGKGLEWVARIRSKYNNYATYYADAVKDRFTISRDDSKNTVYLQMNNLKTEDTAVYYCARAGNFGSSYISYWAYWGQGTLVTVSSGGGGSGGGGSGGGGSQTVVTQEPSLTVSPGGTVTITCGSSTGAVTSGNYPNWVQKKPGQAPRGLIGGTKFLAPGTPARFSGSLSGGKAALTLSGVQPEDEAEYYCVLWYSNRWVFGSGTKLTVL

SEQ ID NO: 95 - protein, 991 aa, Artificial Sequence
  Synthetic
EVQLVESGGGLVQPGGSLTLSCAASGFTFHDYTMHWVRQTPGKCLEWLSGIGWNGYSKGYADSVKGRFTISRDNAKNSLFLQMNSLTSDDTALYYCVKDYHYGSGILDNYYGLDVWGQGTTVTVSSGGGGSGGGGSGGGGSEIVLTQSPATLSVSPGERATLSCRASQSISNNLAWYQQKPGQAPRLLIYGASSRATGIPDRFSGSGSGTEFTLTISSLQSEDFAVYYCQQYKNWPLTFGCGTKVDIKSGGGGSEVQLVESGGGLVQPGGSLKLSCAASGFTFNKYAMNWVRQAPGKGLEWVARIRSKYNNYATYYADSVKDRFTISRDDSKNTAYLQMNNLKTEDTAVYYCVRHGNFGNSYISYWAYWGQGTLVTVSSGGGGSGGGGSGGGGSQTVVTQEPSLTVSPGGTVTLTCGSSTGAVTSGNYPNWVQQKPGQAPRGLIGGTKFLAPGTPARFSGSLLGGKAALTLSGVQPEDEAEYYCVLWYSNRWVFGGGTKLTVLGGGGDKTHTCPPCPAPELLGGPSVFLFPPKPKDTLMISRTPEVTCVVVDVSHEDPEVKFNWYVDGVEVHNAKTKPCEEQYGSTYRCVSVLTVLHQDWLNGKEYKCKVSNKALPAPIEKTISKAKGQPREPQVYTLPPSREEMTKNQVSLTCLVKGFYPSDIAVEWESNGQPENNYKTTPPVLDSDGSFFLYSKLTVDKSRWQQGNVFSCSVMHEALHNHYTQKSLSLSPGKGGGGSGGGGSGGGGSGGGGSGGGGSGGGGSDKTHTCPPCPAPELLGGPSVFLFPPKPKDTLMISRTPEVTCVVVDVSHEDPEVKFNWYVDGVEVHNAKTKPCEEQYGSTYRCVSVLTVLHQDWLNGKEYKCKVSNKALPAPIEKTISKAKGQPREPQVYTLPPSREEMTKNQVSLTCLVKGFYPSDIAVEWESNGQPENNYKTTPPVLDSDGSFFLYSKLTVDKSRWQQGNVFSCSVMHEALHNHYTQKSLSLSPGK

SEQ ID NO: 96 - protein, 991 aa, Artificial Sequence
  Synthetic
EVQLVESGGGLVQPGGSLTLSCAASGFTFHDYTMHWVRQTPGKCLEWLSGIGWNGYSKGYADSVKGRFTISRDNAKNSLFLQMNSLTSDDTALYYCVKDYHYGSGILDNYYGLDVWGQGTTVTVSSGGGGSGGGGSGGGGSEIVLTQSPATLSVSPGERATLSCRASQSISNNLAWYQQKPGQAPRLLIYGASSRATGIPDRFSGSGSGTEFTLTISSLQSEDFAVYYCQQYKNWPLTFGCGTKVDIKSGGGGSEVQLVESGGGLVQPGGSLKLSCAASGFTFNKYAINWVRQAPGKGLEWVARIRSKYNNYATYYADAVKDRFTISRDDSKNTVYLQMNNLKTEDTAVYYCARAGNFGSSYISYWAYWGQGTLVTVSSGGGGSGGGGSGGGGSQTVVTQEPSLTVSPGGTVTITCGSSTGAVTSGNYPNWVQKKPGQAPRGLIGGTKFLAPGTPARFSGSLSGGKAALTLSGVQPEDEAEYYCVLWYSNRWVFGSGTKLTVLGGGGDKTHTCPPCPAPELLGGPSVFLFPPKPKDTLMISRTPEVTCVVVDVSHEDPEVKFNWYVDGVEVHNAKTKPCEEQYGSTYRCVSVLTVLHQDWLNGKEYKCKVSNKALPAPIEKTISKAKGQPREPQVYTLPPSREEMTKNQVSLTCLVKGFYPSDIAVEWESNGQPENNYKTTPPVLDSDGSFFLYSKLTVDKSRWQQGNVFSCSVMHEALHNHYTQKSLSLSPGKGGGGSGGGGSGGGGSGGGGSGGGGSGGGGSDKTHTCPPCPAPELLGGPSVFLFPPKPKDTLMISRTPEVTCVVVDVSHEDPEVKFNWYVDGVEVHNAKTKPCEEQYGSTYRCVSVLTVLHQDWLNGKEYKCKVSNKALPAPIEKTISKAKGQPREPQVYTLPPSREEMTKNQVSLTCLVKGFYPSDIAVEWESNGQPENNYKTTPPVLDSDGSFFLYSKLTVDKSRWQQGNVFSCSVMHEALHNHYTQKSLSLSPGK

SEQ ID NO: 97 - protein, 5 aa, Artificial Sequence
  Synthetic
DYTMH

SEQ ID NO: 98 - protein, 17 aa, Artificial Sequence
  Synthetic
GISWNTGTIGYADSVKG

SEQ ID NO: 99 - protein, 16 aa, Artificial Sequence
  Synthetic
DAFYGGDYYYNYGMDV

SEQ ID NO: 100 - protein, 11 aa, Artificial Sequence
  Synthetic
RASQSVNNNLA

SEQ ID NO: 101 - protein, 7 aa, Artificial Sequence
  Synthetic
GASTRAT

SEQ ID NO: 102 - protein, 9 aa, Artificial Sequence
  Synthetic
QQYNNWPLT

SEQ ID NO: 103 - protein, 125 aa, Artificial Sequence
  Synthetic
EVQLVESGGGLVQPGRSLRLSCAASGFTFHDYTMHWVRQAPGKCLEWVSGISWNTGTIGYADSVKGRFTISRDNAKNSLYLQMNSLRAEDTALYYCVKDAFYGGDYYYNYGMDVWGHGTTVTVSS

SEQ ID NO: 104 - protein, 107 aa, Artificial Sequence
  Synthetic
EIVLTQSPATLSVSPGERATLSCRASQSVNNNLAWYQQKPGQAPRLLIYGASTRATGIPARFSGSGSGTDFTLTISSLQSDDFAVYYCQQYNNWPLTFGCGTKVEIK

SEQ ID NO: 105 - protein, 247 aa, Artificial Sequence
  Synthetic
EVQLVESGGGLVQPGRSLRLSCAASGFTFHDYTMHWVRQAPGKCLEWVSGISWNTGTIGYADSVKGRFTISRDNAKNSLYLQMNSLRAEDTALYYCVKDAFYGGDYYYNYGMDVWGHGTTVTVSSGGGGSGGGGSGGGGSEIVLTQSPATLSVSPGERATLSCRASQSVNNNLAWYQQKPGQAPRLLIYGASTRATGIPARFSGSGSGTDFTLTISSLQSDDFAVYYCQQYNNWPLTFGCGTKVEIK

SEQ ID NO: 106 - protein, 502 aa, Artificial Sequence
  Synthetic
EVQLVESGGGLVQPGRSLRLSCAASGFTFHDYTMHWVRQAPGKCLEWVSGISWNTGTIGYADSVKGRFTISRDNAKNSLYLQMNSLRAEDTALYYCVKDAFYGGDYYYNYGMDVWGHGTTVTVSSGGGGSGGGGSGGGGSEIVLTQSPATLSVSPGERATLSCRASQSVNNNLAWYQQKPGQAPRLLIYGASTRATGIPARFSGSGSGTDFTLTISSLQSDDFAVYYCQQYNNWPLTFGCGTKVEIKSGGGGSEVQLVESGGGLVQPGGSLKLSCAASGFTFNKYAMNWVRQAPGKGLEWVARIRSKYNNYATYYADSVKDRFTISRDDSKNTAYLQMNNLKTEDTAVYYCVRHGNFGNSYISYWAYWGQGTLVTVSSGGGGSGGGGSGGGGSQTVVTQEPSLTVSPGGTVTLTCGSSTGAVTSGNYPNWVQQKPGQAPRGLIGGTKFLAPGTPARFSGSLLGGKAALTLSGVQPEDEAEYYCVLWYSNRWVFGGGTKLTVL

SEQ ID NO: 107 - protein, 502 aa, Artificial Sequence
  Synthetic
EVQLVESGGGLVQPGRSLRLSCAASGFTFHDYTMHWVRQAPGKCLEWVSGISWNTGTIGYADSVKGRFTISRDNAKNSLYLQMNSLRAEDTALYYCVKDAFYGGDYYYNYGMDVWGHGTTVTVSSGGGGSGGGGSGGGGSEIVLTQSPATLSVSPGERATLSCRASQSVNNNLAWYQQKPGQAPRLLIYGASTRATGIPARFSGSGSGTDFTLTISSLQSDDFAVYYCQQYNNWPLTFGCGTKVEIKSGGGGSEVQLVESGGGLVQPGGSLKLSCAASGFTFNKYAINWVRQAPGKGLEWVARIRSKYNNYATYYADAVKDRFTISRDDSKNTVYLQMNNLKTEDTAVYYCARAGNFGSSYISYWAYWGQGTLVTVSSGGGGSGGGGSGGGGSQTVVTQEPSLTVSPGGTVTITCGSSTGAVTSGNYPNWVQKKPGQAPRGLIGGTKFLAPGTPARFSGSLSGGKAALTLSGVQPEDEAEYYCVLWYSNRWVFGSGTKLTVL

SEQ ID NO: 108 - protein, 990 aa, Artificial Sequence
  Synthetic
EVQLVESGGGLVQPGRSLRLSCAASGFTFHDYTMHWVRQAPGKCLEWVSGISWNTGTIGYADSVKGRFTISRDNAKNSLYLQMNSLRAEDTALYYCVKDAFYGGDYYYNYGMDVWGHGTTVTVSSGGGGSGGGGSGGGGSEIVLTQSPATLSVSPGERATLSCRASQSVNNNLAWYQQKPGQAPRLLIYGASTRATGIPARFSGSGSGTDFTLTISSLQSDDFAVYYCQQYNNWPLTFGCGTKVEIKSGGGGSEVQLVESGGGLVQPGGSLKLSCAASGFTFNKYAMNWVRQAPGKGLEWVARIRSKYNNYATYYADSVKDRFTISRDDSKNTAYLQMNNLKTEDTAVYYCVRHGNFGNSYISYWAYWGQGTLVTVSSGGGGSGGGGSGGGGSQTVVTQEPSLTVSPGGTVTLTCGSSTGAVTSGNYPNWVQQKPGQAPRGLIGGTKFLAPGTPARFSGSLLGGKAALTLSGVQPEDEAEYYCVLWYSNRWVFGGGTKLTVLGGGGDKTHTCPPCPAPELLGGPSVFLFPPKPKDTLMISRTPEVTCVVVDVSHEDPEVKFNWYVDGVEVHNAKTKPCEEQYGSTYRCVSVLTVLHQDWLNGKEYKCKVSNKALPAPIEKTISKAKGQPREPQVYTLPPSREEMTKNQVSLTCLVKGFYPSDIAVEWESNGQPENNYKTTPPVLDSDGSFFLYSKLTVDKSRWQQGNVFSCSVMHEALHNHYTQKSLSLSPGKGGGGSGGGGSGGGGSGGGGSGGGGSGGGGSDKTHTCPPCPAPELLGGPSVFLFPPKPKDTLMISRTPEVTCVVVDVSHEDPEVKFNWYVDGVEVHNAKTKPCEEQYGSTYRCVSVLTVLHQDWLNGKEYKCKVSNKALPAPIEKTISKAKGQPREPQVYTLPPSREEMTKNQVSLTCLVKGFYPSDIAVEWESNGQPENNYKTTPPVLDSDGSFFLYSKLTVDKSRWQQGNVFSCSVMHEALHNHYTQKSLSLSPGK

SEQ ID NO: 109 - protein, 990 aa, Artificial Sequence
  Synthetic
EVQLVESGGGLVQPGRSLRLSCAASGFTFHDYTMHWVRQAPGKCLEWVSGISWNTGTIGYADSVKGRFTISRDNAKNSLYLQMNSLRAEDTALYYCVKDAFYGGDYYYNYGMDVWGHGTTVTVSSGGGGSGGGGSGGGGSEIVLTQSPATLSVSPGERATLSCRASQSVNNNLAWYQQKPGQAPRLLIYGASTRATGIPARFSGSGSGTDFTLTISSLQSDDFAVYYCQQYNNWPLTFGCGTKVEIKSGGGGSEVQLVESGGGLVQPGGSLKLSCAASGFTFNKYAINWVRQAPGKGLEWVARIRSKYNNYATYYADAVKDRFTISRDDSKNTVYLQMNNLKTEDTAVYYCARAGNFGSSYISYWAYWGQGTLVTVSSGGGGSGGGGSGGGGSQTVVTQEPSLTVSPGGTVTITCGSSTGAVTSGNYPNWVQKKPGQAPRGLIGGTKFLAPGTPARFSGSLSGGKAALTLSGVQPEDEAEYYCVLWYSNRWVFGSGTKLTVLGGGGDKTHTCPPCPAPELLGGPSVFLFPPKPKDTLMISRTPEVTCVVVDVSHEDPEVKFNWYVDGVEVHNAKTKPCEEQYGSTYRCVSVLTVLHQDWLNGKEYKCKVSNKALPAPIEKTISKAKGQPREPQVYTLPPSREEMTKNQVSLTCLVKGFYPSDIAVEWESNGQPENNYKTTPPVLDSDGSFFLYSKLTVDKSRWQQGNVFSCSVMHEALHNHYTQKSLSLSPGKGGGGSGGGGSGGGGSGGGGSGGGGSGGGGSDKTHTCPPCPAPELLGGPSVFLFPPKPKDTLMISRTPEVTCVVVDVSHEDPEVKFNWYVDGVEVHNAKTKPCEEQYGSTYRCVSVLTVLHQDWLNGKEYKCKVSNKALPAPIEKTISKAKGQPREPQVYTLPPSREEMTKNQVSLTCLVKGFYPSDIAVEWESNGQPENNYKTTPPVLDSDGSFFLYSKLTVDKSRWQQGNVFSCSVMHEALHNHYTQKSLSLSPGK

SEQ ID NO: 110 - protein, 500 aa, Artificial Sequence
  Synthetic
QVQLVQSGAEVKKPGASVKVSCKASGYTFTSYGISWVRQAPGQCLEWMGWISAYSGNAIYAQKLQGRVTMTRDTSTSTAYMELRSLRSDDTAVYYCARDPDYYGSGSYSDYWGQGTLVTVSSGGGGSGGGGSGGGGSEIVLTQSPATLSVSPGERATLSCRASQSVSSNLAWYQQKPGQAPRLLIYGASSRATGIPARFSGSGSGTEFTLTISSLQSEDFAVYYCQQYHSWPLLTFGCGTKVEIKSGGGGSEVQLVESGGGLVQPGGSLKLSCAASGFTFNKYAINWVRQAPGKGLEWVARIRSKYNNYATYYADAVKDRFTISRDDSKNTVYLQMNNLKTEDTAVYYCARAGNFGSSYISYWAYWGQGTLVTVSSGGGGSGGGGSGGGGSQTVVTQEPSLTVSPGGTVTITCGSSTGAVTSGNYPNWVQKKPGQAPRGLIGGTKFLAPGTPARFSGSLSGGKAALTLSGVQPEDEAEYYCVLWYSNRWVFGSGTKLTVL

SEQ ID NO: 111 - protein, 988 aa, Artificial Sequence
  Synthetic
QVQLVQSGAEVKKPGASVKVSCKASGYTFTSYGISWVRQAPGQCLEWMGWISAYSGNAIYAQKLQGRVTMTRDTSTSTAYMELRSLRSDDTAVYYCARDPDYYGSGSYSDYWGQGTLVTVSSGGGGSGGGGSGGGGSEIVLTQSPATLSVSPGERATLSCRASQSVSSNLAWYQQKPGQAPRLLIYGASSRATGIPARFSGSGSGTEFTLTISSLQSEDFAVYYCQQYHSWPLLTFGCGTKVEIKSGGGGSEVQLVESGGGLVQPGGSLKLSCAASGFTFNKYAINWVRQAPGKGLEWVARIRSKYNNYATYYADAVKDRFTISRDDSKNTVYLQMNNLKTEDTAVYYCARAGNFGSSYISYWAYWGQGTLVTVSSGGGGSGGGGSGGGGSQTVVTQEPSLTVSPGGTVTITCGSSTGAVTSGNYPNWVQKKPGQAPRGLIGGTKFLAPGTPARFSGSLSGGKAALTLSGVQPEDEAEYYCVLWYSNRWVFGSGTKLTVLGGGGDKTHTCPPCPAPELLGGPSVFLFPPKPKDTLMISRTPEVTCVVVDVSHEDPEVKFNWYVDGVEVHNAKTKPCEEQYGSTYRCVSVLTVLHQDWLNGKEYKCKVSNKALPAPIEKTISKAKGQPREPQVYTLPPSREEMTKNQVSLTCLVKGFYPSDIAVEWESNGQPENNYKTTPPVLDSDGSFFLYSKLTVDKSRWQQGNVFSCSVMHEALHNHYTQKSLSLSPGKGGGGSGGGGSGGGGSGGGGSGGGGSGGGGSDKTHTCPPCPAPELLGGPSVFLFPPKPKDTLMISRTPEVTCVVVDVSHEDPEVKFNWYVDGVEVHNAKTKPCEEQYGSTYRCVSVLTVLHQDWLNGKEYKCKVSNKALPAPIEKTISKAKGQPREPQVYTLPPSREEMTKNQVSLTCLVKGFYPSDIAVEWESNGQPENNYKTTPPVLDSDGSFFLYSKLTVDKSRWQQGNVFSCSVMHEALHNHYTQKSLSLSPGK

SEQ ID NO: 112 - protein, 5 aa, Artificial Sequence
  Synthetic
NYGIS

SEQ ID NO: 113 - protein, 17 aa, Artificial Sequence
  Synthetic
WISAYNGKTSYAQKFQG

SEQ ID NO: 114 - protein, 7 aa, Artificial Sequence
  Synthetic
STGDGEY

SEQ ID NO: 115 - protein, 11 aa, Artificial Sequence
  Synthetic
RASQSVSSNLA

SEQ ID NO: 116 - protein, 7 aa, Artificial Sequence
  Synthetic
GASTRAT

SEQ ID NO: 117 - protein, 10 aa, Artificial Sequence
  Synthetic
QQYHTWPVLT

SEQ ID NO: 118 - protein, 116 aa, Artificial Sequence
  Synthetic
QVQLVQSGAEVKKPGASVKVSCKASGYTFNNYGISWVRQAPGQCLEWMGWISAYNGKTSYAQKFQGRVTMTTDTSTGTAYMELRSLRSDDTAVYYCARSTGDGEYWGQGTLVTVSS

SEQ ID NO: 119 - protein, 108 aa, Artificial Sequence
  Synthetic
EIVMTQSPATLSVSPGERATLSCRASQSVSSNLAWYQQKPGQAPRLLIYGASTRATGIPARFSGGGSGTEFTLTISSLQSEDFAVYYCQQYHTWPVLTFGCGTKVEIK

SEQ ID NO: 120 - protein, 239 aa, Artificial Sequence
  Synthetic
QVQLVQSGAEVKKPGASVKVSCKASGYTFNNYGISWVRQAPGQCLEWMGWISAYNGKTSYAQKFQGRVTMTTDTSTGTAYMELRSLRSDDTAVYYCARSTGDGEYWGQGTLVTVSSGGGGSGGGGSGGGGSEIVMTQSPATLSVSPGERATLSCRASQSVSSNLAWYQQKPGQAPRLLIYGASTRATGIPARFSGGGSGTEFTLTISSLQSEDFAVYYCQQYHTWPVLTFGCGTKVEIK

SEQ ID NO: 121 - protein, 494 aa, Artificial Sequence
  Synthetic
QVQLVQSGAEVKKPGASVKVSCKASGYTFNNYGISWVRQAPGQCLEWMGWISAYNGKTSYAQKFQGRVTMTTDTSTGTAYMELRSLRSDDTAVYYCARSTGDGEYWGQGTLVTVSSGGGGSGGGGSGGGGSEIVMTQSPATLSVSPGERATLSCRASQSVSSNLAWYQQKPGQAPRLLIYGASTRATGIPARFSGGGSGTEFTLTISSLQSEDFAVYYCQQYHTWPVLTFGCGTKVEIKSGGGGSEVQLVESGGGLVQPGGSLKLSCAASGFTFNKYAMNWVRQAPGKGLEWVARIRSKYNNYATYYADSVKDRFTISRDDSKNTAYLQMNNLKTEDTAVYYCVRHGNFGNSYISYWAYWGQGTLVTVSSGGGGSGGGGSGGGGSQTVVTQEPSLTVSPGGTVTLTCGSSTGAVTSGNYPNWVQQKPGQAPRGLIGGTKFLAPGTPARFSGSLLGGKAALTLSGVQPEDEAEYYCVLWYSNRWVFGGGTKLTVL

SEQ ID NO: 122 - protein, 494 aa, Artificial Sequence
  Synthetic
QVQLVQSGAEVKKPGASVKVSCKASGYTFNNYGISWVRQAPGQCLEWMGWISAYNGKTSYAQKFQGRVTMTTDTSTGTAYMELRSLRSDDTAVYYCARSTGDGEYWGQGTLVTVSSGGGGSGGGGSGGGGSEIVMTQSPATLSVSPGERATLSCRASQSVSSNLAWYQQKPGQAPRLLIYGASTRATGIPARFSGGGSGTEFTLTISSLQSEDFAVYYCQQYHTWPVLTFGCGTKVEIKSGGGGSEVQLVESGGGLVQPGGSLKLSCAASGFTFNKYAINWVRQAPGKGLEWVARIRSKYNNYATYYADAVKDRFTISRDDSKNTVYLQMNNLKTEDTAVYYCARAGNFGSSYISYWAYWGQGTLVTVSSGGGGSGGGGSGGGGSQTVVTQEPSLTVSPGGTVTITCGSSTGAVTSGNYPNWVQKKPGQAPRGLIGGTKFLAPGTPARFSGSLSGGKAALTLSGVQPEDEAEYYCVLWYSNRWVFGSGTKLTVL

SEQ ID NO: 123 - protein, 982 aa, Artificial Sequence
  Synthetic
QVQLVQSGAEVKKPGASVKVSCKASGYTFNNYGISWVRQAPGQCLEWMGWISAYNGKTSYAQKFQGRVTMTTDTSTGTAYMELRSLRSDDTAVYYCARSTGDGEYWGQGTLVTVSSGGGGSGGGGSGGGGSEIVMTQSPATLSVSPGERATLSCRASQSVSSNLAWYQQKPGQAPRLLIYGASTRATGIPARFSGGGSGTEFTLTISSLQSEDFAVYYCQQYHTWPVLTFGCGTKVEIKSGGGGSEVQLVESGGGLVQPGGSLKLSCAASGFTFNKYAMNWVRQAPGKGLEWVARIRSKYNNYATYYADSVKDRFTISRDDSKNTAYLQMNNLKTEDTAVYYCVRHGNFGNSYISYWAYWGQGTLVTVSSGGGGSGGGGSGGGGSQTVVTQEPSLTVSPGGTVTLTCGSSTGAVTSGNYPNWVQQKPGQAPRGLIGGTKFLAPGTPARFSGSLLGGKAALTLSGVQPEDEAEYYCVLWYSNRWVFGGGTKLTVLGGGGDKTHTCPPCPAPELLGGPSVFLFPPKPKDTLMISRTPEVTCVVVDVSHEDPEVKFNWYVDGVEVHNAKTKPCEEQYGSTYRCVSVLTVLHQDWLNGKEYKCKVSNKALPAPIEKTISKAKGQPREPQVYTLPPSREEMTKNQVSLTCLVKGFYPSDIAVEWESNGQPENNYKTTPPVLDSDGSFFLYSKLTVDKSRWQQGNVFSCSVMHEALHNHYTQKSLSLSPGKGGGGSGGGGSGGGGSGGGGSGGGGSGGGGSDKTHTCPPCPAPELLGGPSVFLFPPKPKDTLMISRTPEVTCVVVDVSHEDPEVKFNWYVDGVEVHNAKTKPCEEQYGSTYRCVSVLTVLHQDWLNGKEYKCKVSNKALPAPIEKTISKAKGQPREPQVYTLPPSREEMTKNQVSLTCLVKGFYPSDIAVEWESNGQPENNYKTTPPVLDSDGSFFLYSKLTVDKSRWQQGNVFSCSVMHEALHNHYTQKSLSLSPGK

SEQ ID NO: 124 - protein, 982 aa, Artificial Sequence
  Synthetic
QVQLVQSGAEVKKPGASVKVSCKASGYTFNNYGISWVRQAPGQCLEWMGWISAYNGKTSYAQKFQGRVTMTTDTSTGTAYMELRSLRSDDTAVYYCARSTGDGEYWGQGTLVTVSSGGGGSGGGGSGGGGSEIVMTQSPATLSVSPGERATLSCRASQSVSSNLAWYQQKPGQAPRLLIYGASTRATGIPARFSGGGSGTEFTLTISSLQSEDFAVYYCQQYHTWPVLTFGCGTKVEIKSGGGGSEVQLVESGGGLVQPGGSLKLSCAASGFTFNKYAINWVRQAPGKGLEWVARIRSKYNNYATYYADAVKDRFTISRDDSKNTVYLQMNNLKTEDTAVYYCARAGNFGSSYISYWAYWGQGTLVTVSSGGGGSGGGGSGGGGSQTVVTQEPSLTVSPGGTVTITCGSSTGAVTSGNYPNWVQKKPGQAPRGLIGGTKFLAPGTPARFSGSLSGGKAALTLSGVQPEDEAEYYCVLWYSNRWVFGSGTKLTVLGGGGDKTHTCPPCPAPELLGGPSVFLFPPKPKDTLMISRTPEVTCVVVDVSHEDPEVKFNWYVDGVEVHNAKTKPCEEQYGSTYRCVSVLTVLHQDWLNGKEYKCKVSNKALPAPIEKTISKAKGQPREPQVYTLPPSREEMTKNQVSLTCLVKGFYPSDIAVEWESNGQPENNYKTTPPVLDSDGSFFLYSKLTVDKSRWQQGNVFSCSVMHEALHNHYTQKSLSLSPGKGGGGSGGGGSGGGGSGGGGSGGGGSGGGGSDKTHTCPPCPAPELLGGPSVFLFPPKPKDTLMISRTPEVTCVVVDVSHEDPEVKFNWYVDGVEVHNAKTKPCEEQYGSTYRCVSVLTVLHQDWLNGKEYKCKVSNKALPAPIEKTISKAKGQPREPQVYTLPPSREEMTKNQVSLTCLVKGFYPSDIAVEWESNGQPENNYKTTPPVLDSDGSFFLYSKLTVDKSRWQQGNVFSCSVMHEALHNHYTQKSLSLSPGK

SEQ ID NO: 125 - protein, 7 aa, Artificial Sequence
  Synthetic
NSDYFWG

SEQ ID NO: 126 - protein, 16 aa, Artificial Sequence
  Synthetic
TIYYSGRTYYNPSLKS

SEQ ID NO: 127 - protein, 8 aa, Artificial Sequence
  Synthetic
YQYGSFDY

SEQ ID NO: 128 - protein, 16 aa, Artificial Sequence
  Synthetic
RSSQSLLHSNGYNYLD

SEQ ID NO: 129 - protein, 7 aa, Artificial Sequence
  Synthetic
LGSNRAS

SEQ ID NO: 130 - protein, 9 aa, Artificial Sequence
  Synthetic
MQALQTPYT

SEQ ID NO: 131 - protein, 118 aa, Artificial Sequence
  Synthetic
QLQLQESGPGLVKPSETLSLTCFVSGGSISNSDYFWGWIRQPPGKCLEWIGTIYYSGRTYYNPSLKSRVTISVDTSKNQFSLMLSSVTAVDTAVYYCARYQYGSFDYWGQGTLVTVSS

SEQ ID NO: 132 - protein, 112 aa, Artificial Sequence
  Synthetic
DIVMTQTPLSLPVTPGEPASISCRSSQSLLHSNGYNYLDWYLQKPGQSPQLLIYLGSNRASGVPDRFSGSGSGTDFTLKISRVEAEDVGVYYCMQALQTPYTFGCGTKVEIR

SEQ ID NO: 133 - protein, 245 aa, Artificial Sequence
  Synthetic
QLQLQESGPGLVKPSETLSLTCFVSGGSISNSDYFWGWIRQPPGKCLEWIGTIYYSGRTYYNPSLKSRVTISVDTSKNQFSLMLSSVTAVDTAVYYCARYQYGSFDYWGQGTLVTVSSGGGGSGGGGSGGGGSDIVMTQTPLSLPVTPGEPASISCRSSQSLLHSNGYNYLDWYLQKPGQSPQLLIYLGSNRASGVPDRFSGSGSGTDFTLKISRVEAEDVGVYYCMQALQTPYTFGCGTKVEIR

SEQ ID NO: 134 - protein, 500 aa, Artificial Sequence
  Synthetic
QLQLQESGPGLVKPSETLSLTCFVSGGSISNSDYFWGWIRQPPGKCLEWIGTIYYSGRTYYNPSLKSRVTISVDTSKNQFSLMLSSVTAVDTAVYYCARYQYGSFDYWGQGTLVTVSSGGGGSGGGGSGGGGSDIVMTQTPLSLPVTPGEPASISCRSSQSLLHSNGYNYLDWYLQKPGQSPQLLIYLGSNRASGVPDRFSGSGSGTDFTLKISRVEAEDVGVYYCMQALQTPYTFGCGTKVEIRSGGGGSEVQLVESGGGLVQPGGSLKLSCAASGFTFNKYAMNWVRQAPGKGLEWVARIRSKYNNYATYYADSVKDRFTISRDDSKNTAYLQMNNLKTEDTAVYYCVRHGNFGNSYISYWAYWGQGTLVTVSSGGGGSGGGGSGGGGSQTVVTQEPSLTVSPGGTVTLTCGSSTGAVTSGNYPNWVQQKPGQAPRGLIGGTKFLAPGTPARFSGSLLGGKAALTLSGVQPEDEAEYYCVLWYSNRWVFGGGTKLTVL

SEQ ID NO: 135 - protein, 500 aa, Artificial Sequence
  Synthetic
QLQLQESGPGLVKPSETLSLTCFVSGGSISNSDYFWGWIRQPPGKCLEWIGTIYYSGRTYYNPSLKSRVTISVDTSKNQFSLMLSSVTAVDTAVYYCARYQYGSFDYWGQGTLVTVSSGGGGSGGGGSGGGGSDIVMTQTPLSLPVTPGEPASISCRSSQSLLHSNGYNYLDWYLQKPGQSPQLLIYLGSNRASGVPDRFSGSGSGTDFTLKISRVEAEDVGVYYCMQALQTPYTFGCGTKVEIRSGGGGSEVQLVESGGGLVQPGGSLKLSCAASGFTFNKYAINWVRQAPGKGLEWVARIRSKYNNYATYYADAVKDRFTISRDDSKNTVYLQMNNLKTEDTAVYYCARAGNFGSSYISYWAYWGQGTLVTVSSGGGGSGGGGSGGGGSQTVVTQEPSLTVSPGGTVTITCGSSTGAVTSGNYPNWVQKKPGQAPRGLIGGTKFLAPGTPARFSGSLSGGKAALTLSGVQPEDEAEYYCVLWYSNRWVFGSGTKLTVL

SEQ ID NO: 136 - protein, 988 aa, Artificial Sequence
  Synthetic
QLQLQESGPGLVKPSETLSLTCFVSGGSISNSDYFWGWIRQPPGKCLEWIGTIYYSGRTYYNPSLKSRVTISVDTSKNQFSLMLSSVTAVDTAVYYCARYQYGSFDYWGQGTLVTVSSGGGGSGGGGSGGGGSDIVMTQTPLSLPVTPGEPASISCRSSQSLLHSNGYNYLDWYLQKPGQSPQLLIYLGSNRASGVPDRFSGSGSGTDFTLKISRVEAEDVGVYYCMQALQTPYTFGCGTKVEIRSGGGGSEVQLVESGGGLVQPGGSLKLSCAASGFTFNKYAMNWVRQAPGKGLEWVARIRSKYNNYATYYADSVKDRFTISRDDSKNTAYLQMNNLKTEDTAVYYCVRHGNFGNSYISYWAYWGQGTLVTVSSGGGGSGGGGSGGGGSQTVVTQEPSLTVSPGGTVTLTCGSSTGAVTSGNYPNWVQQKPGQAPRGLIGGTKFLAPGTPARFSGSLLGGKAALTLSGVQPEDEAEYYCVLWYSNRWVFGGGTKLTVLGGGGDKTHTCPPCPAPELLGGPSVFLFPPKPKDTLMISRTPEVTCVVVDVSHEDPEVKFNWYVDGVEVHNAKTKPCEEQYGSTYRCVSVLTVLHQDWLNGKEYKCKVSNKALPAPIEKTISKAKGQPREPQVYTLPPSREEMTKNQVSLTCLVKGFYPSDIAVEWESNGQPENNYKTTPPVLDSDGSFFLYSKLTVDKSRWQQGNVFSCSVMHEALHNHYTQKSLSLSPGKGGGGSGGGGSGGGGSGGGGSGGGGSGGGGSDKTHTCPPCPAPELLGGPSVFLFPPKPKDTLMISRTPEVTCVVVDVSHEDPEVKFNWYVDGVEVHNAKTKPCEEQYGSTYRCVSVLTVLHQDWLNGKEYKCKVSNKALPAPIEKTISKAKGQPREPQVYTLPPSREEMTKNQVSLTCLVKGFYPSDIAVEWESNGQPENNYKTTPPVLDSDGSFFLYSKLTVDKSRWQQGNVFSCSVMHEALHNHYTQKSLSLSPGK

SEQ ID NO: 137 - protein, 988 aa, Artificial Sequence
  Synthetic
QLQLQESGPGLVKPSETLSLTCFVSGGSISNSDYFWGWIRQPPGKCLEWIGTIYYSGRTYYNPSLKSRVTISVDTSKNQFSLMLSSVTAVDTAVYYCARYQYGSFDYWGQGTLVTVSSGGGGSGGGGSGGGGSDIVMTQTPLSLPVTPGEPASISCRSSQSLLHSNGYNYLDWYLQKPGQSPQLLIYLGSNRASGVPDRFSGSGSGTDFTLKISRVEAEDVGVYYCMQALQTPYTFGCGTKVEIRSGGGGSEVQLVESGGGLVQPGGSLKLSCAASGFTFNKYAINWVRQAPGKGLEWVARIRSKYNNYATYYADAVKDRFTISRDDSKNTVYLQMNNLKTEDTAVYYCARAGNFGSSYISYWAYWGQGTLVTVSSGGGGSGGGGSGGGGSQTVVTQEPSLTVSPGGTVTITCGSSTGAVTSGNYPNWVQKKPGQAPRGLIGGTKFLAPGTPARFSGSLSGGKAALTLSGVQPEDEAEYYCVLWYSNRWVFGSGTKLTVLGGGGDKTHTCPPCPAPELLGGPSVFLFPPKPKDTLMISRTPEVTCVVVDVSHEDPEVKFNWYVDGVEVHNAKTKPCEEQYGSTYRCVSVLTVLHQDWLNGKEYKCKVSNKALPAPIEKTISKAKGQPREPQVYTLPPSREEMTKNQVSLTCLVKGFYPSDIAVEWESNGQPENNYKTTPPVLDSDGSFFLYSKLTVDKSRWQQGNVFSCSVMHEALHNHYTQKSLSLSPGKGGGGSGGGGSGGGGSGGGGSGGGGSGGGGSDKTHTCPPCPAPELLGGPSVFLFPPKPKDTLMISRTPEVTCVVVDVSHEDPEVKFNWYVDGVEVHNAKTKPCEEQYGSTYRCVSVLTVLHQDWLNGKEYKCKVSNKALPAPIEKTISKAKGQPREPQVYTLPPSREEMTKNQVSLTCLVKGFYPSDIAVEWESNGQPENNYKTTPPVLDSDGSFFLYSKLTVDKSRWQQGNVFSCSVMHEALHNHYTQKSLSLSPGK

SEQ ID NO: 138 - protein, 5 aa, Artificial Sequence
  Synthetic
SYGIS

SEQ ID NO: 139 - protein, 17 aa, Artificial Sequence
  Synthetic
WISAYNGNTIYAQKFQG

SEQ ID NO: 140 - protein, 13 aa, Artificial Sequence
  Synthetic
DPDYYGSGSYSDY

SEQ ID NO: 141 - protein, 11 aa, Artificial Sequence
  Synthetic
RASQSVSSNLA

SEQ ID NO: 142 - protein, 7 aa, Artificial Sequence
  Synthetic
GASSRAT

SEQ ID NO: 143 - protein, 10 aa, Artificial Sequence
  Synthetic
QQYHSWPLLT

SEQ ID NO: 144 - protein, 122 aa, Artificial Sequence
  Synthetic
QVQLVQSGAEVKKPGASVKVSCKASGYTFTSYGISWVRQAPGQCLEWMGWISAYNGNTIYAQKFQGRVTLTRDTSTSTAYMELRSLRSDDTAMYYCARDPDYYGSGSYSDYWGQGTLVTVSS

SEQ ID NO: 145 - protein, 108 aa, Artificial Sequence; identical to SEQ ID NO: 40
  Synthetic

SEQ ID NO: 146 - protein, 245 aa, Artificial Sequence
  Synthetic
QVQLVQSGAEVKKPGASVKVSCKASGYTFTSYGISWVRQAPGQCLEWMGWISAYNGNTIYAQKFQGRVTLTRDTSTSTAYMELRSLRSDDTAMYYCARDPDYYGSGSYSDYWGQGTLVTVSSGGGGSGGGGSGGGGSEIVLTQSPATLSVSPGERATLSCRASQSVSSNLAWYQQKPGQAPRLLIYGASSRATGIPARFSGSGSGTEFTLTISSLQSEDFAVYYCQQYHSWPLLTFGCGTKVEIK

SEQ ID NO: 147 - protein, 500 aa, Artificial Sequence
  Synthetic
QVQLVQSGAEVKKPGASVKVSCKASGYTFTSYGISWVRQAPGQCLEWMGWISAYNGNTIYAQKFQGRVTLTRDTSTSTAYMELRSLRSDDTAMYYCARDPDYYGSGSYSDYWGQGTLVTVSSGGGGSGGGGSGGGGSEIVLTQSPATLSVSPGERATLSCRASQSVSSNLAWYQQKPGQAPRLLIYGASSRATGIPARFSGSGSGTEFTLTISSLQSEDFAVYYCQQYHSWPLLTFGCGTKVEIKSGGGGSEVQLVESGGGLVQPGGSLKLSCAASGFTFNKYAMNWVRQAPGKGLEWVARIRSKYNNYATYYADSVKDRFTISRDDSKNTAYLQMNNLKTEDTAVYYCVRHGNFGNSYISYWAYWGQGTLVTVSSGGGGSGGGGSGGGGSQTVVTQEPSLTVSPGGTVTLTCGSSTGAVTSGNYPNWVQQKPGQAPRGLIGGTKFLAPGTPARFSGSLLGGKAALTLSGVQPEDEAEYYCVLWYSNRWVFGGGTKLTVL

SEQ ID NO: 148 - protein, 500 aa, Artificial Sequence
  Synthetic
QVQLVQSGAEVKKPGASVKVSCKASGYTFTSYGISWVRQAPGQCLEWMGWISAYNGNTIYAQKFQGRVTLTRDTSTSTAYMELRSLRSDDTAMYYCARDPDYYGSGSYSDYWGQGTLVTVSSGGGGSGGGGSGGGGSEIVLTQSPATLSVSPGERATLSCRASQSVSSNLAWYQQKPGQAPRLLIYGASSRATGIPARFSGSGSGTEFTLTISSLQSEDFAVYYCQQYHSWPLLTFGCGTKVEIKSGGGGSEVQLVESGGGLVQPGGSLKLSCAASGFTFNKYAINWVRQAPGKGLEWVARIRSKYNNYATYYADAVKDRFTISRDDSKNTVYLQMNNLKTEDTAVYYCARAGNFGSSYISYWAYWGQGTLVTVSSGGGGSGGGGSGGGGSQTVVTQEPSLTVSPGGTVTITCGSSTGAVTSGNYPNWVQKKPGQAPRGLIGGTKFLAPGTPARFSGSLSGGKAALTLSGVQPEDEAEYYCVLWYSNRWVFGSGTKLTVL

SEQ ID NO: 149 - protein, 988 aa, Artificial Sequence
  Synthetic
QVQLVQSGAEVKKPGASVKVSCKASGYTFTSYGISWVRQAPGQCLEWMGWISAYNGNTIYAQKFQGRVTLTRDTSTSTAYMELRSLRSDDTAMYYCARDPDYYGSGSYSDYWGQGTLVTVSSGGGGSGGGGSGGGGSEIVLTQSPATLSVSPGERATLSCRASQSVSSNLAWYQQKPGQAPRLLIYGASSRATGIPARFSGSGSGTEFTLTISSLQSEDFAVYYCQQYHSWPLLTFGCGTKVEIKSGGGGSEVQLVESGGGLVQPGGSLKLSCAASGFTFNKYAMNWVRQAPGKGLEWVARIRSKYNNYATYYADSVKDRFTISRDDSKNTAYLQMNNLKTEDTAVYYCVRHGNFGNSYISYWAYWGQGTLVTVSSGGGGSGGGGSGGGGSQTVVTQEPSLTVSPGGTVTLTCGSSTGAVTSGNYPNWVQQKPGQAPRGLIGGTKFLAPGTPARFSGSLLGGKAALTLSGVQPEDEAEYYCVLWYSNRWVFGGGTKLTVLGGGGDKTHTCPPCPAPELLGGPSVFLFPPKPKDTLMISRTPEVTCVVVDVSHEDPEVKFNWYVDGVEVHNAKTKPCEEQYGSTYRCVSVLTVLHQDWLNGKEYKCKVSNKALPAPIEKTISKAKGQPREPQVYTLPPSREEMTKNQVSLTCLVKGFYPSDIAVEWESNGQPENNYKTTPPVLDSDGSFFLYSKLTVDKSRWQQGNVFSCSVMHEALHNHYTQKSLSLSPGKGGGGSGGGGSGGGGSGGGGSGGGGSGGGGSDKTHTCPPCPAPELLGGPSVFLFPPKPKDTLMISRTPEVTCVVVDVSHEDPEVKFNWYVDGVEVHNAKTKPCEEQYGSTYRCVSVLTVLHQDWLNGKEYKCKVSNKALPAPIEKTISKAKGQPREPQVYTLPPSREEMTKNQVSLTCLVKGFYPSDIAVEWESNGQPENNYKTTPPVLDSDGSFFLYSKLTVDKSRWQQGNVFSCSVMHEALHNHYTQKSLSLSPGK

SEQ ID NO: 150 - protein, 988 aa, Artificial Sequence
  Synthetic
QVQLVQSGAEVKKPGASVKVSCKASGYTFTSYGISWVRQAPGQCLEWMGWISAYNGNTIYAQKFQGRVTLTRDTSTSTAYMELRSLRSDDTAMYYCARDPDYYGSGSYSDYWGQGTLVTVSSGGGGSGGGGSGGGGSEIVLTQSPATLSVSPGERATLSCRASQSVSSNLAWYQQKPGQAPRLLIYGASSRATGIPARFSGSGSGTEFTLTISSLQSEDFAVYYCQQYHSWPLLTFGCGTKVEIKSGGGGSEVQLVESGGGLVQPGGSLKLSCAASGFTFNKYAINWVRQAPGKGLEWVARIRSKYNNYATYYADAVKDRFTISRDDSKNTVYLQMNNLKTEDTAVYYCARAGNFGSSYISYWAYWGQGTLVTVSSGGGGSGGGGSGGGGSQTVVTQEPSLTVSPGGTVTITCGSSTGAVTSGNYPNWVQKKPGQAPRGLIGGTKFLAPGTPARFSGSLSGGKAALTLSGVQPEDEAEYYCVLWYSNRWVFGSGTKLTVLGGGGDKTHTCPPCPAPELLGGPSVFLFPPKPKDTLMISRTPEVTCVVVDVSHEDPEVKFNWYVDGVEVHNAKTKPCEEQYGSTYRCVSVLTVLHQDWLNGKEYKCKVSNKALPAPIEKTISKAKGQPREPQVYTLPPSREEMTKNQVSLTCLVKGFYPSDIAVEWESNGQPENNYKTTPPVLDSDGSFFLYSKLTVDKSRWQQGNVFSCSVMHEALHNHYTQKSLSLSPGKGGGGSGGGGSGGGGSGGGGSGGGGSGGGGSDKTHTCPPCPAPELLGGPSVFLFPPKPKDTLMISRTPEVTCVVVDVSHEDPEVKFNWYVDGVEVHNAKTKPCEEQYGSTYRCVSVLTVLHQDWLNGKEYKCKVSNKALPAPIEKTISKAKGQPREPQVYTLPPSREEMTKNQVSLTCLVKGFYPSDIAVEWESNGQPENNYKTTPPVLDSDGSFFLYSKLTVDKSRWQQGNVFSCSVMHEALHNHYTQKSLSLSPGK

SEQ ID NO: 151 - protein, 5 aa, Artificial Sequence
  Synthetic
TYGIS

SEQ ID NO: 152 - protein, 17 aa, Artificial Sequence
  Synthetic
WISPKNGVTTYAQKFQG

SEQ ID NO: 153 - protein, 13 aa, Artificial Sequence
  Synthetic
DPDYYGSGSYSDY

SEQ ID NO: 154 - protein, 11 aa, Artificial Sequence
  Synthetic
RASQSVSSNLA

SEQ ID NO: 155 - protein, 7 aa, Artificial Sequence
  Synthetic
GASSRAT

SEQ ID NO: 156 - protein, 10 aa, Artificial Sequence
  Synthetic
QQYHSWPLLT

SEQ ID NO: 157 - protein, 122 aa, Artificial Sequence
  Synthetic
QVQLVQSGAEVKKPGASVKVSCKASGYTFTTYGISWVRQAPGQCLEWMGWISPKNGVTTYAQKFQGRVTITADESTSTAYMELSRLTSDDTAMYYCARDPDYYGSGSYSDYWGQGTLVTVSS

SEQ ID NO: 158 - protein, 108 aa, Artificial Sequence; identical to SEQ ID NO: 40
  Synthetic

SEQ ID NO: 159 - protein, 245 aa, Artificial Sequence
  Synthetic
QVQLVQSGAEVKKPGASVKVSCKASGYTFTTYGISWVRQAPGQCLEWMGWISPKNGVTTYAQKFQGRVTITADESTSTAYMELSRLTSDDTAMYYCARDPDYYGSGSYSDYWGQGTLVTVSSGGGGSGGGGSGGGGSEIVLTQSPATLSVSPGERATLSCRASQSVSSNLAWYQQKPGQAPRLLIYGASSRATGIPARFSGSGSGTEFTLTISSLQSEDFAVYYCQQYHSWPLLTFGCGTKVEIK

SEQ ID NO: 160 - protein, 500 aa, Artificial Sequence
  Synthetic
QVQLVQSGAEVKKPGASVKVSCKASGYTFTTYGISWVRQAPGQCLEWMGWISPKNGVTTYAQKFQGRVTITADESTSTAYMELSRLTSDDTAMYYCARDPDYYGSGSYSDYWGQGTLVTVSSGGGGSGGGGSGGGGSEIVLTQSPATLSVSPGERATLSCRASQSVSSNLAWYQQKPGQAPRLLIYGASSRATGIPARFSGSGSGTEFTLTISSLQSEDFAVYYCQQYHSWPLLTFGCGTKVEIKSGGGGSEVQLVESGGGLVQPGGSLKLSCAASGFTFNKYAMNWVRQAPGKGLEWVARIRSKYNNYATYYADSVKDRFTISRDDSKNTAYLQMNNLKTEDTAVYYCVRHGNFGNSYISYWAYWGQGTLVTVSSGGGGSGGGGSGGGGSQTVVTQEPSLTVSPGGTVTLTCGSSTGAVTSGNYPNWVQQKPGQAPRGLIGGTKFLAPGTPARFSGSLLGGKAALTLSGVQPEDEAEYYCVLWYSNRWVFGGGTKLTVL

SEQ ID NO: 161 - protein, 500 aa, Artificial Sequence
  Synthetic
QVQLVQSGAEVKKPGASVKVSCKASGYTFTTYGISWVRQAPGQCLEWMGWISPKNGVTTYAQKFQGRVTITADESTSTAYMELSRLTSDDTAMYYCARDPDYYGSGSYSDYWGQGTLVTVSSGGGGSGGGGSGGGGSEIVLTQSPATLSVSPGERATLSCRASQSVSSNLAWYQQKPGQAPRLLIYGASSRATGIPARFSGSGSGTEFTLTISSLQSEDFAVYYCQQYHSWPLLTFGCGTKVEIKSGGGGSEVQLVESGGGLVQPGGSLKLSCAASGFTFNKYAINWVRQAPGKGLEWVARIRSKYNNYATYYADAVKDRFTISRDDSKNTVYLQMNNLKTEDTAVYYCARAGNFGSSYISYWAYWGQGTLVTVSSGGGGSGGGGSGGGGSQTVVTQEPSLTVSPGGTVTITCGSSTGAVTSGNYPNWVQKKPGQAPRGLIGGTKFLAPGTPARFSGSLSGGKAALTLSGVQPEDEAEYYCVLWYSNRWVFGSGTKLTVL

SEQ ID NO: 162 - protein, 988 aa, Artificial Sequence
  Synthetic
QVQLVQSGAEVKKPGASVKVSCKASGYTFTTYGISWVRQAPGQCLEWMGWISPKNGVTTYAQKFQGRVTITADESTSTAYMELSRLTSDDTAMYYCARDPDYYGSGSYSDYWGQGTLVTVSSGGGGSGGGGSGGGGSEIVLTQSPATLSVSPGERATLSCRASQSVSSNLAWYQQKPGQAPRLLIYGASSRATGIPARFSGSGSGTEFTLTISSLQSEDFAVYYCQQYHSWPLLTFGCGTKVEIKSGGGGSEVQLVESGGGLVQPGGSLKLSCAASGFTFNKYAMNWVRQAPGKGLEWVARIRSKYNNYATYYADSVKDRFTISRDDSKNTAYLQMNNLKTEDTAVYYCVRHGNFGNSYISYWAYWGQGTLVTVSSGGGGSGGGGSGGGGSQTVVTQEPSLTVSPGGTVTLTCGSSTGAVTSGNYPNWVQQKPGQAPRGLIGGTKFLAPGTPARFSGSLLGGKAALTLSGVQPEDEAEYYCVLWYSNRWVFGGGTKLTVLGGGGDKTHTCPPCPAPELLGGPSVFLFPPKPKDTLMISRTPEVTCVVVDVSHEDPEVKFNWYVDGVEVHNAKTKPCEEQYGSTYRCVSVLTVLHQDWLNGKEYKCKVSNKALPAPIEKTISKAKGQPREPQVYTLPPSREEMTKNQVSLTCLVKGFYPSDIAVEWESNGQPENNYKTTPPVLDSDGSFFLYSKLTVDKSRWQQGNVFSCSVMHEALHNHYTQKSLSLSPGKGGGGSGGGGSGGGGSGGGGSGGGGSGGGGSDKTHTCPPCPAPELLGGPSVFLFPPKPKDTLMISRTPEVTCVVVDVSHEDPEVKFNWYVDGVEVHNAKTKPCEEQYGSTYRCVSVLTVLHQDWLNGKEYKCKVSNKALPAPIEKTISKAKGQPREPQVYTLPPSREEMTKNQVSLTCLVKGFYPSDIAVEWESNGQPENNYKTTPPVLDSDGSFFLYSKLTVDKSRWQQGNVFSCSVMHEALHNHYTQKSLSLSPGK

SEQ ID NO: 163 - protein, 988 aa, Artificial Sequence
  Synthetic
QVQLVQSGAEVKKPGASVKVSCKASGYTFTTYGISWVRQAPGQCLEWMGWISPKNGVTTYAQKFQGRVTITADESTSTAYMELSRLTSDDTAMYYCARDPDYYGSGSYSDYWGQGTLVTVSSGGGGSGGGGSGGGGSEIVLTQSPATLSVSPGERATLSCRASQSVSSNLAWYQQKPGQAPRLLIYGASSRATGIPARFSGSGSGTEFTLTISSLQSEDFAVYYCQQYHSWPLLTFGCGTKVEIKSGGGGSEVQLVESGGGLVQPGGSLKLSCAASGFTFNKYAINWVRQAPGKGLEWVARIRSKYNNYATYYADAVKDRFTISRDDSKNTVYLQMNNLKTEDTAVYYCARAGNFGSSYISYWAYWGQGTLVTVSSGGGGSGGGGSGGGGSQTVVTQEPSLTVSPGGTVTITCGSSTGAVTSGNYPNWVQKKPGQAPRGLIGGTKFLAPGTPARFSGSLSGGKAALTLSGVQPEDEAEYYCVLWYSNRWVFGSGTKLTVLGGGGDKTHTCPPCPAPELLGGPSVFLFPPKPKDTLMISRTPEVTCVVVDVSHEDPEVKFNWYVDGVEVHNAKTKPCEEQYGSTYRCVSVLTVLHQDWLNGKEYKCKVSNKALPAPIEKTISKAKGQPREPQVYTLPPSREEMTKNQVSLTCLVKGFYPSDIAVEWESNGQPENNYKTTPPVLDSDGSFFLYSKLTVDKSRWQQGNVFSCSVMHEALHNHYTQKSLSLSPGKGGGGSGGGGSGGGGSGGGGSGGGGSGGGGSDKTHTCPPCPAPELLGGPSVFLFPPKPKDTLMISRTPEVTCVVVDVSHEDPEVKFNWYVDGVEVHNAKTKPCEEQYGSTYRCVSVLTVLHQDWLNGKEYKCKVSNKALPAPIEKTISKAKGQPREPQVYTLPPSREEMTKNQVSLTCLVKGFYPSDIAVEWESNGQPENNYKTTPPVLDSDGSFFLYSKLTVDKSRWQQGNVFSCSVMHEALHNHYTQKSLSLSPGK

SEQ ID NO: 164 - protein, 5 aa, Artificial Sequence
  Synthetic
SYGIS

SEQ ID NO: 165 - protein, 17 aa, Artificial Sequence
  Synthetic
WISPQTGNAIYAQKLQG

SEQ ID NO: 166 - protein, 13 aa, Artificial Sequence
  Synthetic
DPDYYGSGSYSDY

SEQ ID NO: 167 - protein, 11 aa, Artificial Sequence
  Synthetic
RASQSVSSNLA

SEQ ID NO: 168 - protein, 7 aa, Artificial Sequence
  Synthetic
GASSRAT

SEQ ID NO: 169 - protein, 10 aa, Artificial Sequence
  Synthetic
QQYHSWPLLT

SEQ ID NO: 170 - protein, 122 aa, Artificial Sequence
  Synthetic
QVQLVQSGGEVKKPGASVKVSCKASGYTFTSYGISWVRQAPGQCLEWMGWISPQTGNAIYAQKLQGRVTMTRDTSTSTAYMELRSLRSDDTAVYYCARDPDYYGSGSYSDYWGQGTLVTVSS

SEQ ID NO: 171 - protein, 108 aa, Artificial Sequence; identical to SEQ ID NO: 40
  Synthetic

SEQ ID NO: 172 - protein, 245 aa, Artificial Sequence
  Synthetic
QVQLVQSGGEVKKPGASVKVSCKASGYTFTSYGISWVRQAPGQCLEWMGWISPQTGNAIYAQKLQGRVTMTRDTSTSTAYMELRSLRSDDTAVYYCARDPDYYGSGSYSDYWGQGTLVTVSSGGGGSGGGGSGGGGSEIVLTQSPATLSVSPGERATLSCRASQSVSSNLAWYQQKPGQAPRLLIYGASSRATGIPARFSGSGSGTEFTLTISSLQSEDFAVYYCQQYHSWPLLTFGCGTKVEIK

SEQ ID NO: 173 - protein, 500 aa, Artificial Sequence
  Synthetic
QVQLVQSGGEVKKPGASVKVSCKASGYTFTSYGISWVRQAPGQCLEWMGWISPQTGNAIYAQKLQGRVTMTRDTSTSTAYMELRSLRSDDTAVYYCARDPDYYGSGSYSDYWGQGTLVTVSSGGGGSGGGGSGGGGSEIVLTQSPATLSVSPGERATLSCRASQSVSSNLAWYQQKPGQAPRLLIYGASSRATGIPARFSGSGSGTEFTLTISSLQSEDFAVYYCQQYHSWPLLTFGCGTKVEIKSGGGGSEVQLVESGGGLVQPGGSLKLSCAASGFTFNKYAMNWVRQAPGKGLEWVARIRSKYNNYATYYADSVKDRFTISRDDSKNTAYLQMNNLKTEDTAVYYCVRHGNFGNSYISYWAYWGQGTLVTVSSGGGGSGGGGSGGGGSQTVVTQEPSLTVSPGGTVTLTCGSSTGAVTSGNYPNWVQQKPGQAPRGLIGGTKFLAPGTPARFSGSLLGGKAALTLSGVQPEDEAEYYCVLWYSNRWVFGGGTKLTVL

SEQ ID NO: 174 - protein, 500 aa, Artificial Sequence
  Synthetic
QVQLVQSGGEVKKPGASVKVSCKASGYTFTSYGISWVRQAPGQCLEWMGWISPQTGNAIYAQKLQGRVTMTRDTSTSTAYMELRSLRSDDTAVYYCARDPDYYGSGSYSDYWGQGTLVTVSSGGGGSGGGGSGGGGSEIVLTQSPATLSVSPGERATLSCRASQSVSSNLAWYQQKPGQAPRLLIYGASSRATGIPARFSGSGSGTEFTLTISSLQSEDFAVYYCQQYHSWPLLTFGCGTKVEIKSGGGGSEVQLVESGGGLVQPGGSLKLSCAASGFTFNKYAINWVRQAPGKGLEWVARIRSKYNNYATYYADAVKDRFTISRDDSKNTVYLQMNNLKTEDTAVYYCARAGNFGSSYISYWAYWGQGTLVTVSSGGGGSGGGGSGGGGSQTVVTQEPSLTVSPGGTVTITCGSSTGAVTSGNYPNWVQKKPGQAPRGLIGGTKFLAPGTPARFSGSLSGGKAALTLSGVQPEDEAEYYCVLWYSNRWVFGSGTKLTVL

SEQ ID NO: 175 - protein, 988 aa, Artificial Sequence
  Synthetic
QVQLVQSGGEVKKPGASVKVSCKASGYTFTSYGISWVRQAPGQCLEWMGWISPQTGNAIYAQKLQGRVTMTRDTSTSTAYMELRSLRSDDTAVYYCARDPDYYGSGSYSDYWGQGTLVTVSSGGGGSGGGGSGGGGSEIVLTQSPATLSVSPGERATLSCRASQSVSSNLAWYQQKPGQAPRLLIYGASSRATGIPARFSGSGSGTEFTLTISSLQSEDFAVYYCQQYHSWPLLTFGCGTKVEIKSGGGGSEVQLVESGGGLVQPGGSLKLSCAASGFTFNKYAMNWVRQAPGKGLEWVARIRSKYNNYATYYADSVKDRFTISRDDSKNTAYLQMNNLKTEDTAVYYCVRHGNFGNSYISYWAYWGQGTLVTVSSGGGGSGGGGSGGGGSQTVVTQEPSLTVSPGGTVTLTCGSSTGAVTSGNYPNWVQQKPGQAPRGLIGGTKFLAPGTPARFSGSLLGGKAALTLSGVQPEDEAEYYCVLWYSNRWVFGGGTKLTVLGGGGDKTHTCPPCPAPELLGGPSVFLFPPKPKDTLMISRTPEVTCVVVDVSHEDPEVKFNWYVDGVEVHNAKTKPCEEQYGSTYRCVSVLTVLHQDWLNGKEYKCKVSNKALPAPIEKTISKAKGQPREPQVYTLPPSREEMTKNQVSLTCLVKGFYPSDIAVEWESNGQPENNYKTTPPVLDSDGSFFLYSKLTVDKSRWQQGNVFSCSVMHEALHNHYTQKSLSLSPGKGGGGSGGGGSGGGGSGGGGSGGGGSGGGGSDKTHTCPPCPAPELLGGPSVFLFPPKPKDTLMISRTPEVTCVVVDVSHEDPEVKFNWYVDGVEVHNAKTKPCEEQYGSTYRCVSVLTVLHQDWLNGKEYKCKVSNKALPAPIEKTISKAKGQPREPQVYTLPPSREEMTKNQVSLTCLVKGFYPSDIAVEWESNGQPENNYKTTPPVLDSDGSFFLYSKLTVDKSRWQQGNVFSCSVMHEALHNHYTQKSLSLSPGK

SEQ ID NO: 176 - protein, 988 aa, Artificial Sequence
  Synthetic
QVQLVQSGGEVKKPGASVKVSCKASGYTFTSYGISWVRQAPGQCLEWMGWISPQTGNAIYAQKLQGRVTMTRDTSTSTAYMELRSLRSDDTAVYYCARDPDYYGSGSYSDYWGQGTLVTVSSGGGGSGGGGSGGGGSEIVLTQSPATLSVSPGERATLSCRASQSVSSNLAWYQQKPGQAPRLLIYGASSRATGIPARFSGSGSGTEFTLTISSLQSEDFAVYYCQQYHSWPLLTFGCGTKVEIKSGGGGSEVQLVESGGGLVQPGGSLKLSCAASGFTFNKYAINWVRQAPGKGLEWVARIRSKYNNYATYYADAVKDRFTISRDDSKNTVYLQMNNLKTEDTAVYYCARAGNFGSSYISYWAYWGQGTLVTVSSGGGGSGGGGSGGGGSQTVVTQEPSLTVSPGGTVTITCGSSTGAVTSGNYPNWVQKKPGQAPRGLIGGTKFLAPGTPARFSGSLSGGKAALTLSGVQPEDEAEYYCVLWYSNRWVFGSGTKLTVLGGGGDKTHTCPPCPAPELLGGPSVFLFPPKPKDTLMISRTPEVTCVVVDVSHEDPEVKFNWYVDGVEVHNAKTKPCEEQYGSTYRCVSVLTVLHQDWLNGKEYKCKVSNKALPAPIEKTISKAKGQPREPQVYTLPPSREEMTKNQVSLTCLVKGFYPSDIAVEWESNGQPENNYKTTPPVLDSDGSFFLYSKLTVDKSRWQQGNVFSCSVMHEALHNHYTQKSLSLSPGKGGGGSGGGGSGGGGSGGGGSGGGGSGGGGSDKTHTCPPCPAPELLGGPSVFLFPPKPKDTLMISRTPEVTCVVVDVSHEDPEVKFNWYVDGVEVHNAKTKPCEEQYGSTYRCVSVLTVLHQDWLNGKEYKCKVSNKALPAPIEKTISKAKGQPREPQVYTLPPSREEMTKNQVSLTCLVKGFYPSDIAVEWESNGQPENNYKTTPPVLDSDGSFFLYSKLTVDKSRWQQGNVFSCSVMHEALHNHYTQKSLSLSPGK

SEQ ID NO: 177 - protein, 5 aa, Artificial Sequence
  Synthetic
SYGIS

SEQ ID NO: 178 - protein, 17 aa, Artificial Sequence
  Synthetic
WISAYNGNAIYAQKLQG

SEQ ID NO: 179 - protein, 13 aa, Artificial Sequence
  Synthetic
DPDYYGSGSYSDY

SEQ ID NO: 180 - protein, 11 aa, Artificial Sequence
  Synthetic
RASQSVSSNLA

SEQ ID NO: 181 - protein, 7 aa, Artificial Sequence
  Synthetic
GASSRAT

SEQ ID NO: 182 - protein, 10 aa, Artificial Sequence
  Synthetic
QQYHSWPILH

SEQ ID NO: 183 - protein, 122 aa, Artificial Sequence
  Synthetic
QVQLVQSGAEVKKPGASVKVSCKASGYTFTSYGISWVRQAPGQCLEWMGWISAYNGNAIYAQKLQGRVTMTRDTSTSTAYMELRSLRSDDTAVYYCARDPDYYGSGSYSDYWGQGTLVTVSS

SEQ ID NO: 184 - protein, 108 aa, Artificial Sequence
  Synthetic
EIVLTQSPATLSVSPGERATLSCRASQSVSSNLAWYQQKPGQAPRLLIYGASSRATGIPARFSGSGSGTEFTLTISSLQSEDFAVYYCQQYHSWPILHFGCGTKVEIK

SEQ ID NO: 185 - protein, 245 aa, Artificial Sequence
  Synthetic
QVQLVQSGAEVKKPGASVKVSCKASGYTFTSYGISWVRQAPGQCLEWMGWISAYNGNAIYAQKLQGRVTMTRDTSTSTAYMELRSLRSDDTAVYYCARDPDYYGSGSYSDYWGQGTLVTVSSGGGGSGGGGSGGGGSEIVLTQSPATLSVSPGERATLSCRASQSVSSNLAWYQQKPGQAPRLLIYGASSRATGIPARFSGSGSGTEFTLTISSLQSEDFAVYYCQQYHSWPILHFGCGTKVEIK

SEQ ID NO: 186 - protein, 500 aa, Artificial Sequence
  Synthetic
QVQLVQSGAEVKKPGASVKVSCKASGYTFTSYGISWVRQAPGQCLEWMGWISAYNGNAIYAQKLQGRVTMTRDTSTSTAYMELRSLRSDDTAVYYCARDPDYYGSGSYSDYWGQGTLVTVSSGGGGSGGGGSGGGGSEIVLTQSPATLSVSPGERATLSCRASQSVSSNLAWYQQKPGQAPRLLIYGASSRATGIPARFSGSGSGTEFTLTISSLQSEDFAVYYCQQYHSWPILHFGCGTKVEIKSGGGGSEVQLVESGGGLVQPGGSLKLSCAASGFTFNKYAMNWVRQAPGKGLEWVARIRSKYNNYATYYADSVKDRFTISRDDSKNTAYLQMNNLKTEDTAVYYCVRHGNFGNSYISYWAYWGQGTLVTVSSGGGGSGGGGSGGGGSQTVVTQEPSLTVSPGGTVTLTCGSSTGAVTSGNYPNWVQQKPGQAPRGLIGGTKFLAPGTPARFSGSLLGGKAALTLSGVQPEDEAEYYCVLWYSNRWVFGGGTKLTVL

SEQ ID NO: 187 - protein, 500 aa, Artificial Sequence
  Synthetic
QVQLVQSGAEVKKPGASVKVSCKASGYTFTSYGISWVRQAPGQCLEWMGWISAYNGNAIYAQKLQGRVTMTRDTSTSTAYMELRSLRSDDTAVYYCARDPDYYGSGSYSDYWGQGTLVTVSSGGGGSGGGGSGGGGSEIVLTQSPATLSVSPGERATLSCRASQSVSSNLAWYQQKPGQAPRLLIYGASSRATGIPARFSGSGSGTEFTLTISSLQSEDFAVYYCQQYHSWPILHFGCGTKVEIKSGGGGSEVQLVESGGGLVQPGGSLKLSCAASGFTFNKYAINWVRQAPGKGLEWVARIRSKYNNYATYYADAVKDRFTISRDDSKNTVYLQMNNLKTEDTAVYYCARAGNFGSSYISYWAYWGQGTLVTVSSGGGGSGGGGSGGGGSQTVVTQEPSLTVSPGGTVTITCGSSTGAVTSGNYPNWVQKKPGQAPRGLIGGTKFLAPGTPARFSGSLSGGKAALTLSGVQPEDEAEYYCVLWYSNRWVFGSGTKLTVL

SEQ ID NO: 188 - protein, 988 aa, Artificial Sequence
  Synthetic
QVQLVQSGAEVKKPGASVKVSCKASGYTFTSYGISWVRQAPGQCLEWMGWISAYNGNAIYAQKLQGRVTMTRDTSTSTAYMELRSLRSDDTAVYYCARDPDYYGSGSYSDYWGQGTLVTVSSGGGGSGGGGSGGGGSEIVLTQSPATLSVSPGERATLSCRASQSVSSNLAWYQQKPGQAPRLLIYGASSRATGIPARFSGSGSGTEFTLTISSLQSEDFAVYYCQQYHSWPILHFGCGTKVEIKSGGGGSEVQLVESGGGLVQPGGSLKLSCAASGFTFNKYAMNWVRQAPGKGLEWVARIRSKYNNYATYYADSVKDRFTISRDDSKNTAYLQMNNLKTEDTAVYYCVRHGNFGNSYISYWAYWGQGTLVTVSSGGGGSGGGGSGGGGSQTVVTQEPSLTVSPGGTVTLTCGSSTGAVTSGNYPNWVQQKPGQAPRGLIGGTKFLAPGTPARFSGSLLGGKAALTLSGVQPEDEAEYYCVLWYSNRWVFGGGTKLTVLGGGGDKTHTCPPCPAPELLGGPSVFLFPPKPKDTLMISRTPEVTCVVVDVSHEDPEVKFNWYVDGVEVHNAKTKPCEEQYGSTYRCVSVLTVLHQDWLNGKEYKCKVSNKALPAPIEKTISKAKGQPREPQVYTLPPSREEMTKNQVSLTCLVKGFYPSDIAVEWESNGQPENNYKTTPPVLDSDGSFFLYSKLTVDKSRWQQGNVFSCSVMHEALHNHYTQKSLSLSPGKGGGGSGGGGSGGGGSGGGGSGGGGSGGGGSDKTHTCPPCPAPELLGGPSVFLFPPKPKDTLMISRTPEVTCVVVDVSHEDPEVKFNWYVDGVEVHNAKTKPCEEQYGSTYRCVSVLTVLHQDWLNGKEYKCKVSNKALPAPIEKTISKAKGQPREPQVYTLPPSREEMTKNQVSLTCLVKGFYPSDIAVEWESNGQPENNYKTTPPVLDSDGSFFLYSKLTVDKSRWQQGNVFSCSVMHEALHNHYTQKSLSLSPGK

SEQ ID NO: 189 - protein, 988 aa, Artificial Sequence
  Synthetic
QVQLVQSGAEVKKPGASVKVSCKASGYTFTSYGISWVRQAPGQCLEWMGWISAYNGNAIYAQKLQGRVTMTRDTSTSTAYMELRSLRSDDTAVYYCARDPDYYGSGSYSDYWGQGTLVTVSSGGGGSGGGGSGGGGSEIVLTQSPATLSVSPGERATLSCRASQSVSSNLAWYQQKPGQAPRLLIYGASSRATGIPARFSGSGSGTEFTLTISSLQSEDFAVYYCQQYHSWPILHFGCGTKVEIKSGGGGSEVQLVESGGGLVQPGGSLKLSCAASGFTFNKYAINWVRQAPGKGLEWVARIRSKYNNYATYYADAVKDRFTISRDDSKNTVYLQMNNLKTEDTAVYYCARAGNFGSSYISYWAYWGQGTLVTVSSGGGGSGGGGSGGGGSQTVVTQEPSLTVSPGGTVTITCGSSTGAVTSGNYPNWVQKKPGQAPRGLIGGTKFLAPGTPARFSGSLSGGKAALTLSGVQPEDEAEYYCVLWYSNRWVFGSGTKLTVLGGGGDKTHTCPPCPAPELLGGPSVFLFPPKPKDTLMISRTPEVTCVVVDVSHEDPEVKFNWYVDGVEVHNAKTKPCEEQYGSTYRCVSVLTVLHQDWLNGKEYKCKVSNKALPAPIEKTISKAKGQPREPQVYTLPPSREEMTKNQVSLTCLVKGFYPSDIAVEWESNGQPENNYKTTPPVLDSDGSFFLYSKLTVDKSRWQQGNVFSCSVMHEALHNHYTQKSLSLSPGKGGGGSGGGGSGGGGSGGGGSGGGGSGGGGSDKTHTCPPCPAPELLGGPSVFLFPPKPKDTLMISRTPEVTCVVVDVSHEDPEVKFNWYVDGVEVHNAKTKPCEEQYGSTYRCVSVLTVLHQDWLNGKEYKCKVSNKALPAPIEKTISKAKGQPREPQVYTLPPSREEMTKNQVSLTCLVKGFYPSDIAVEWESNGQPENNYKTTPPVLDSDGSFFLYSKLTVDKSRWQQGNVFSCSVMHEALHNHYTQKSLSLSPGK

SEQ ID NO: 190 - protein, 5 aa, Artificial Sequence
  Synthetic
SYGIT

SEQ ID NO: 191 - protein, 17 aa, Artificial Sequence
  Synthetic
WISAYNGNTIYAQKLQG

SEQ ID NO: 192 - protein, 7 aa, Artificial Sequence
  Synthetic
DSNHEDF

SEQ ID NO: 193 - protein, 11 aa, Artificial Sequence
  Synthetic
RASQSVSSNLA

SEQ ID NO: 194 - protein, 7 aa, Artificial Sequence
  Synthetic
GASTRAT

SEQ ID NO: 195 - protein, 10 aa, Artificial Sequence
  Synthetic
QQYHTWPPVT

SEQ ID NO: 196 - protein, 116 aa, Artificial Sequence
  Synthetic
QVQLVQSGAEVKKPGASVKVSCKASGYSFTSYGITWVRQAPGQCLEWMGWISAYNGNTIYAQKLQGRVTMTTDTSTSTAYMELRSLRSDDTAVYYCVRDSNHEDFWGQGTLVTVSS

SEQ ID NO: 197 - protein, 108 aa, Artificial Sequence
  Synthetic
EIVLTQSPATLSVSPGERATLSCRASQSVSSNLAWYQQKPGQAPRLLIYGASTRATGIPARFSGSGSGTEFTLTISSLQSEDFAVYYCQQYHTWPPVTFGCGTKVEIK

SEQ ID NO: 198 - protein, 239 aa, Artificial Sequence
  Synthetic
QVQLVQSGAEVKKPGASVKVSCKASGYSFTSYGITWVRQAPGQCLEWMGWISAYNGNTIYAQKLQGRVTMTTDTSTSTAYMELRSLRSDDTAVYYCVRDSNHEDFWGQGTLVTVSSGGGGSGGGGSGGGGSEIVLTQSPATLSVSPGERATLSCRASQSVSSNLAWYQQKPGQAPRLLIYGASTRATGIPARFSGSGSGTEFTLTISSLQSEDFAVYYCQQYHTWPPVTFGCGTKVEIK

SEQ ID NO: 199 - protein, 494 aa, Artificial Sequence
  Synthetic
QVQLVQSGAEVKKPGASVKVSCKASGYSFTSYGITWVRQAPGQCLEWMGWISAYNGNTIYAQKLQGRVTMTTDTSTSTAYMELRSLRSDDTAVYYCVRDSNHEDFWGQGTLVTVSSGGGGSGGGGSGGGGSEIVLTQSPATLSVSPGERATLSCRASQSVSSNLAWYQQKPGQAPRLLIYGASTRATGIPARFSGSGSGTEFTLTISSLQSEDFAVYYCQQYHTWPPVTFGCGTKVEIKSGGGGSEVQLVESGGGLVQPGGSLKLSCAASGFTFNKYAMNWVRQAPGKGLEWVARIRSKYNNYATYYADSVKDRFTISRDDSKNTAYLQMNNLKTEDTAVYYCVRHGNFGNSYISYWAYWGQGTLVTVSSGGGGSGGGGSGGGGSQTVVTQEPSLTVSPGGTVTLTCGSSTGAVTSGNYPNWVQQKPGQAPRGLIGGTKFLAPGTPARFSGSLLGGKAALTLSGVQPEDEAEYYCVLWYSNRWVFGGGTKLTVL

SEQ ID NO: 200 - protein, 494 aa, Artificial Sequence
  Synthetic
QVQLVQSGAEVKKPGASVKVSCKASGYSFTSYGITWVRQAPGQCLEWMGWISAYNGNTIYAQKLQGRVTMTTDTSTSTAYMELRSLRSDDTAVYYCVRDSNHEDFWGQGTLVTVSSGGGGSGGGGSGGGGSEIVLTQSPATLSVSPGERATLSCRASQSVSSNLAWYQQKPGQAPRLLIYGASTRATGIPARFSGSGSGTEFTLTISSLQSEDFAVYYCQQYHTWPPVTFGCGTKVEIKSGGGGSEVQLVESGGGLVQPGGSLKLSCAASGFTFNKYAINWVRQAPGKGLEWVARIRSKYNNYATYYADAVKDRFTISRDDSKNTVYLQMNNLKTEDTAVYYCARAGNFGSSYISYWAYWGQGTLVTVSSGGGGSGGGGSGGGGSQTVVTQEPSLTVSPGGTVTITCGSSTGAVTSGNYPNWVQKKPGQAPRGLIGGTKFLAPGTPARFSGSLSGGKAALTLSGVQPEDEAEYYCVLWYSNRWVFGSGTKLTVL

SEQ ID NO: 201 - protein, 982 aa, Artificial Sequence
  Synthetic
QVQLVQSGAEVKKPGASVKVSCKASGYSFTSYGITWVRQAPGQCLEWMGWISAYNGNTIYAQKLQGRVTMTTDTSTSTAYMELRSLRSDDTAVYYCVRDSNHEDFWGQGTLVTVSSGGGGSGGGGSGGGGSEIVLTQSPATLSVSPGERATLSCRASQSVSSNLAWYQQKPGQAPRLLIYGASTRATGIPARFSGSGSGTEFTLTISSLQSEDFAVYYCQQYHTWPPVTFGCGTKVEIKSGGGGSEVQLVESGGGLVQPGGSLKLSCAASGFTFNKYAMNWVRQAPGKGLEWVARIRSKYNNYATYYADSVKDRFTISRDDSKNTAYLQMNNLKTEDTAVYYCVRHGNFGNSYISYWAYWGQGTLVTVSSGGGGSGGGGSGGGGSQTVVTQEPSLTVSPGGTVTLTCGSSTGAVTSGNYPNWVQQKPGQAPRGLIGGTKFLAPGTPARFSGSLLGGKAALTLSGVQPEDEAEYYCVLWYSNRWVFGGGTKLTVLGGGGDKTHTCPPCPAPELLGGPSVFLFPPKPKDTLMISRTPEVTCVVVDVSHEDPEVKFNWYVDGVEVHNAKTKPCEEQYGSTYRCVSVLTVLHQDWLNGKEYKCKVSNKALPAPIEKTISKAKGQPREPQVYTLPPSREEMTKNQVSLTCLVKGFYPSDIAVEWESNGQPENNYKTTPPVLDSDGSFFLYSKLTVDKSRWQQGNVFSCSVMHEALHNHYTQKSLSLSPGKGGGGSGGGGSGGGGSGGGGSGGGGSGGGGSDKTHTCPPCPAPELLGGPSVFLFPPKPKDTLMISRTPEVTCVVVDVSHEDPEVKFNWYVDGVEVHNAKTKPCEEQYGSTYRCVSVLTVLHQDWLNGKEYKCKVSNKALPAPIEKTISKAKGQPREPQVYTLPPSREEMTKNQVSLTCLVKGFYPSDIAVEWESNGQPENNYKTTPPVLDSDGSFFLYSKLTVDKSRWQQGNVFSCSVMHEALHNHYTQKSLSLSPGK

SEQ ID NO: 202 - protein, 982 aa, Artificial Sequence
  Synthetic
QVQLVQSGAEVKKPGASVKVSCKASGYSFTSYGITWVRQAPGQCLEWMGWISAYNGNTIYAQKLQGRVTMTTDTSTSTAYMELRSLRSDDTAVYYCVRDSNHEDFWGQGTLVTVSSGGGGSGGGGSGGGGSEIVLTQSPATLSVSPGERATLSCRASQSVSSNLAWYQQKPGQAPRLLIYGASTRATGIPARFSGSGSGTEFTLTISSLQSEDFAVYYCQQYHTWPPVTFGCGTKVEIKSGGGGSEVQLVESGGGLVQPGGSLKLSCAASGFTFNKYAINWVRQAPGKGLEWVARIRSKYNNYATYYADAVKDRFTISRDDSKNTVYLQMNNLKTEDTAVYYCARAGNFGSSYISYWAYWGQGTLVTVSSGGGGSGGGGSGGGGSQTVVTQEPSLTVSPGGTVTITCGSSTGAVTSGNYPNWVQKKPGQAPRGLIGGTKFLAPGTPARFSGSLSGGKAALTLSGVQPEDEAEYYCVLWYSNRWVFGSGTKLTVLGGGGDKTHTCPPCPAPELLGGPSVFLFPPKPKDTLMISRTPEVTCVVVDVSHEDPEVKFNWYVDGVEVHNAKTKPCEEQYGSTYRCVSVLTVLHQDWLNGKEYKCKVSNKALPAPIEKTISKAKGQPREPQVYTLPPSREEMTKNQVSLTCLVKGFYPSDIAVEWESNGQPENNYKTTPPVLDSDGSFFLYSKLTVDKSRWQQGNVFSCSVMHEALHNHYTQKSLSLSPGKGGGGSGGGGSGGGGSGGGGSGGGGSGGGGSDKTHTCPPCPAPELLGGPSVFLFPPKPKDTLMISRTPEVTCVVVDVSHEDPEVKFNWYVDGVEVHNAKTKPCEEQYGSTYRCVSVLTVLHQDWLNGKEYKCKVSNKALPAPIEKTISKAKGQPREPQVYTLPPSREEMTKNQVSLTCLVKGFYPSDIAVEWESNGQPENNYKTTPPVLDSDGSFFLYSKLTVDKSRWQQGNVFSCSVMHEALHNHYTQKSLSLSPGK

SEQ ID NO: 203 - protein, 5 aa, Artificial Sequence
  Synthetic
SYGIS

SEQ ID NO: 204 - protein, 17 aa, Artificial Sequence
  Synthetic
WISAYNGNTIYAQKLQG

SEQ ID NO: 205 - protein, 9 aa, Artificial Sequence
  Synthetic
DPGVTGDDY

SEQ ID NO: 206 - protein, 11 aa, Artificial Sequence
  Synthetic
RASLSVSSNLA

SEQ ID NO: 207 - protein, 7 aa, Artificial Sequence
  Synthetic
GASTRAT

SEQ ID NO: 208 - protein, 10 aa, Artificial Sequence
  Synthetic
QQYHSWPALT

SEQ ID NO: 209 - protein, 118 aa, Artificial Sequence
  Synthetic
QVQLVQSGAEVKKPGESLKISCKGSGYSFTSYGISWVRQAPGQCLEWMGWISAYNGNTIYAQKLQGRVTMTTDTSTSTAYMELRRLRSDDTAVYYCARDPGVTGDDYWGQGTLVTVSS

SEQ ID NO: 210 - protein, 108 aa, Artificial Sequence
  Synthetic
EIVLTQSPATLSVSPGERATLSCRASLSVSSNLAWYQQKPGQAPRLLIYGASTRATGIPARFSGSGSGTEFTLTISSLQSEDFAVYFCQQYHSWPALTFGCGTKVEIK

SEQ ID NO: 211 - protein, 241 aa, Artificial Sequence
  Synthetic
QVQLVQSGAEVKKPGESLKISCKGSGYSFTSYGISWVRQAPGQCLEWMGWISAYNGNTIYAQKLQGRVTMTTDTSTSTAYMELRRLRSDDTAVYYCARDPGVTGDDYWGQGTLVTVSSGGGGSGGGGSGGGGSEIVLTQSPATLSVSPGERATLSCRASLSVSSNLAWYQQKPGQAPRLLIYGASTRATGIPARFSGSGSGTEFTLTISSLQSEDFAVYFCQQYHSWPALTFGCGTKVEIK

SEQ ID NO: 212 - protein, 496 aa, Artificial Sequence
  Synthetic
QVQLVQSGAEVKKPGESLKISCKGSGYSFTSYGISWVRQAPGQCLEWMGWISAYNGNTIYAQKLQGRVTMTTDTSTSTAYMELRRLRSDDTAVYYCARDPGVTGDDYWGQGTLVTVSSGGGGSGGGGSGGGGSEIVLTQSPATLSVSPGERATLSCRASLSVSSNLAWYQQKPGQAPRLLIYGASTRATGIPARFSGSGSGTEFTLTISSLQSEDFAVYFCQQYHSWPALTFGCGTKVEIKSGGGGSEVQLVESGGGLVQPGGSLKLSCAASGFTFNKYAMNWVRQAPGKGLEWVARIRSKYNNYATYYADSVKDRFTISRDDSKNTAYLQMNNLKTEDTAVYYCVRHGNFGNSYISYWAYWGQGTLVTVSSGGGGSGGGGSGGGGSQTVVTQEPSLTVSPGGTVTLTCGSSTGAVTSGNYPNWVQQKPGQAPRGLIGGTKFLAPGTPARFSGSLLGGKAALTLSGVQPEDEAEYYCVLWYSNRWVFGGGTKLTVL

SEQ ID NO: 213 - protein, 496 aa, Artificial Sequence
  Synthetic
QVQLVQSGAEVKKPGESLKISCKGSGYSFTSYGISWVRQAPGQCLEWMGWISAYNGNTIYAQKLQGRVTMTTDTSTSTAYMELRRLRSDDTAVYYCARDPGVTGDDYWGQGTLVTVSSGGGGSGGGGSGGGGSEIVLTQSPATLSVSPGERATLSCRASLSVSSNLAWYQQKPGQAPRLLIYGASTRATGIPARFSGSGSGTEFTLTISSLQSEDFAVYFCQQYHSWPALTFGCGTKVEIKSGGGGSEVQLVESGGGLVQPGGSLKLSCAASGFTFNKYAINWVRQAPGKGLEWVARIRSKYNNYATYYADAVKDRFTISRDDSKNTVYLQMNNLKTEDTAVYYCARAGNFGSSYISYWAYWGQGTLVTVSSGGGGSGGGGSGGGGSQTVVTQEPSLTVSPGGTVTITCGSSTGAVTSGNYPNWVQKKPGQAPRGLIGGTKFLAPGTPARFSGSLSGGKAALTLSGVQPEDEAEYYCVLWYSNRWVFGSGTKLTVL

SEQ ID NO: 214 - protein, 984 aa, Artificial Sequence
  Synthetic
QVQLVQSGAEVKKPGESLKISCKGSGYSFTSYGISWVRQAPGQCLEWMGWISAYNGNTIYAQKLQGRVTMTTDTSTSTAYMELRRLRSDDTAVYYCARDPGVTGDDYWGQGTLVTVSSGGGGSGGGGSGGGGSEIVLTQSPATLSVSPGERATLSCRASLSVSSNLAWYQQKPGQAPRLLIYGASTRATGIPARFSGSGSGTEFTLTISSLQSEDFAVYFCQQYHSWPALTFGCGTKVEIKSGGGGSEVQLVESGGGLVQPGGSLKLSCAASGFTFNKYAMNWVRQAPGKGLEWVARIRSKYNNYATYYADSVKDRFTISRDDSKNTAYLQMNNLKTEDTAVYYCVRHGNFGNSYISYWAYWGQGTLVTVSSGGGGSGGGGSGGGGSQTVVTQEPSLTVSPGGTVTLTCGSSTGAVTSGNYPNWVQQKPGQAPRGLIGGTKFLAPGTPARFSGSLLGGKAALTLSGVQPEDEAEYYCVLWYSNRWVFGGGTKLTVLGGGGDKTHTCPPCPAPELLGGPSVFLFPPKPKDTLMISRTPEVTCVVVDVSHEDPEVKFNWYVDGVEVHNAKTKPCEEQYGSTYRCVSVLTVLHQDWLNGKEYKCKVSNKALPAPIEKTISKAKGQPREPQVYTLPPSREEMTKNQVSLTCLVKGFYPSDIAVEWESNGQPENNYKTTPPVLDSDGSFFLYSKLTVDKSRWQQGNVFSCSVMHEALHNHYTQKSLSLSPGKGGGGSGGGGSGGGGSGGGGSGGGGSGGGGSDKTHTCPPCPAPELLGGPSVFLFPPKPKDTLMISRTPEVTCVVVDVSHEDPEVKFNWYVDGVEVHNAKTKPCEEQYGSTYRCVSVLTVLHQDWLNGKEYKCKVSNKALPAPIEKTISKAKGQPREPQVYTLPPSREEMTKNQVSLTCLVKGFYPSDIAVEWESNGQPENNYKTTPPVLDSDGSFFLYSKLTVDKSRWQQGNVFSCSVMHEALHNHYTQKSLSLSPGK

SEQ ID NO: 215 - protein, 984 aa, Artificial Sequence
  Synthetic
QVQLVQSGAEVKKPGESLKISCKGSGYSFTSYGISWVRQAPGQCLEWMGWISAYNGNTIYAQKLQGRVTMTTDTSTSTAYMELRRLRSDDTAVYYCARDPGVTGDDYWGQGTLVTVSSGGGGSGGGGSGGGGSEIVLTQSPATLSVSPGERATLSCRASLSVSSNLAWYQQKPGQAPRLLIYGASTRATGIPARFSGSGSGTEFTLTISSLQSEDFAVYFCQQYHSWPALTFGCGTKVEIKSGGGGSEVQLVESGGGLVQPGGSLKLSCAASGFTFNKYAINWVRQAPGKGLEWVARIRSKYNNYATYYADAVKDRFTISRDDSKNTVYLQMNNLKTEDTAVYYCARAGNFGSSYISYWAYWGQGTLVTVSSGGGGSGGGGSGGGGSQTVVTQEPSLTVSPGGTVTITCGSSTGAVTSGNYPNWVQKKPGQAPRGLIGGTKFLAPGTPARFSGSLSGGKAALTLSGVQPEDEAEYYCVLWYSNRWVFGSGTKLTVLGGGGDKTHTCPPCPAPELLGGPSVFLFPPKPKDTLMISRTPEVTCVVVDVSHEDPEVKFNWYVDGVEVHNAKTKPCEEQYGSTYRCVSVLTVLHQDWLNGKEYKCKVSNKALPAPIEKTISKAKGQPREPQVYTLPPSREEMTKNQVSLTCLVKGFYPSDIAVEWESNGQPENNYKTTPPVLDSDGSFFLYSKLTVDKSRWQQGNVFSCSVMHEALHNHYTQKSLSLSPGKGGGGSGGGGSGGGGSGGGGSGGGGSGGGGSDKTHTCPPCPAPELLGGPSVFLFPPKPKDTLMISRTPEVTCVVVDVSHEDPEVKFNWYVDGVEVHNAKTKPCEEQYGSTYRCVSVLTVLHQDWLNGKEYKCKVSNKALPAPIEKTISKAKGQPREPQVYTLPPSREEMTKNQVSLTCLVKGFYPSDIAVEWESNGQPENNYKTTPPVLDSDGSFFLYSKLTVDKSRWQQGNVFSCSVMHEALHNHYTQKSLSLSPGK

SEQ ID NO: 216 - protein, 5 aa, Artificial Sequence
  Synthetic
AYGMH

SEQ ID NO: 217 - protein, 17 aa, Artificial Sequence
  Synthetic
VILYDGSNKYYADSVKG

SEQ ID NO: 218 - protein, 13 aa, Artificial Sequence
  Synthetic
GSGWLQLGDYFDY

SEQ ID NO: 219 - protein, 14 aa, Artificial Sequence
  Synthetic
TGTSSDVGGYNYVS

SEQ ID NO: 220 - protein, 7 aa, Artificial Sequence
  Synthetic
EVSNRPS

SEQ ID NO: 221 - protein, 10 aa, Artificial Sequence
  Synthetic
SSYTSSSTLV

SEQ ID NO: 222 - protein, 122 aa, Artificial Sequence
  Synthetic
QVQLVESGGGVVQPGRSLRLSCAASGFTFSAYGMHWVRQAPGKCLEWVAVILYDGSNKYYADSVKGRFTISRDNSKNTLYLQMNSLRAEDTAVYYCARGSGWLQLGDYFDYWGQGTLVTVSS

SEQ ID NO: 223 - protein, 110 aa, Artificial Sequence
  Synthetic
QSALTQPPSVSGSPGQSITISCTGTSSDVGGYNYVSWYQQHPGKAPKLMIYEVSNRPSGVSNRFSGSKSGNTASLTISGLQAEDEADYYCSSYTSSSTLVFGCGTKLTVL

SEQ ID NO: 224 - protein, 247 aa, Artificial Sequence
  Synthetic
QVQLVESGGGVVQPGRSLRLSCAASGFTFSAYGMHWVRQAPGKCLEWVAVILYDGSNKYYADSVKGRFTISRDNSKNTLYLQMNSLRAEDTAVYYCARGSGWLQLGDYFDYWGQGTLVTVSSGGGGSGGGGSGGGGSQSALTQPPSVSGSPGQSITISCTGTSSDVGGYNYVSWYQQHPGKAPKLMIYEVSNRPSGVSNRFSGSKSGNTASLTISGLQAEDEADYYCSSYTSSSTLVFGCGTKLTVL

SEQ ID NO: 225 - protein, 502 aa, Artificial Sequence
  Synthetic
QVQLVESGGGVVQPGRSLRLSCAASGFTFSAYGMHWVRQAPGKCLEWVAVILYDGSNKYYADSVKGRFTISRDNSKNTLYLQMNSLRAEDTAVYYCARGSGWLQLGDYFDYWGQGTLVTVSSGGGGSGGGGSGGGGSQSALTQPPSVSGSPGQSITISCTGTSSDVGGYNYVSWYQQHPGKAPKLMIYEVSNRPSGVSNRFSGSKSGNTASLTISGLQAEDEADYYCSSYTSSSTLVFGCGTKLTVLSGGGGSEVQLVESGGGLVQPGGSLKLSCAASGFTFNKYAMNWVRQAPGKGLEWVARIRSKYNNYATYYADSVKDRFTISRDDSKNTAYLQMNNLKTEDTAVYYCVRHGNFGNSYISYWAYWGQGTLVTVSSGGGGSGGGGSGGGGSQTVVTQEPSLTVSPGGTVTLTCGSSTGAVTSGNYPNWVQQKPGQAPRGLIGGTKFLAPGTPARFSGSLLGGKAALTLSGVQPEDEAEYYCVLWYSNRWVFGGGTKLTVL

SEQ ID NO: 226 - protein, 502 aa, Artificial Sequence
  Synthetic
QVQLVESGGGVVQPGRSLRLSCAASGFTFSAYGMHWVRQAPGKCLEWVAVILYDGSNKYYADSVKGRFTISRDNSKNTLYLQMNSLRAEDTAVYYCARGSGWLQLGDYFDYWGQGTLVTVSSGGGGSGGGGSGGGGSQSALTQPPSVSGSPGQSITISCTGTSSDVGGYNYVSWYQQHPGKAPKLMIYEVSNRPSGVSNRFSGSKSGNTASLTISGLQAEDEADYYCSSYTSSSTLVFGCGTKLTVLSGGGGSEVQLVESGGGLVQPGGSLKLSCAASGFTFNKYAINWVRQAPGKGLEWVARIRSKYNNYATYYADAVKDRFTISRDDSKNTVYLQMNNLKTEDTAVYYCARAGNFGSSYISYWAYWGQGTLVTVSSGGGGSGGGGSGGGGSQTVVTQEPSLTVSPGGTVTITCGSSTGAVTSGNYPNWVQKKPGQAPRGLIGGTKFLAPGTPARFSGSLSGGKAALTLSGVQPEDEAEYYCVLWYSNRWVFGSGTKLTVL

SEQ ID NO: 227 - protein, 990 aa, Artificial Sequence
  Synthetic
QVQLVESGGGVVQPGRSLRLSCAASGFTFSAYGMHWVRQAPGKCLEWVAVILYDGSNKYYADSVKGRFTISRDNSKNTLYLQMNSLRAEDTAVYYCARGSGWLQLGDYFDYWGQGTLVTVSSGGGGSGGGGSGGGGSQSALTQPPSVSGSPGQSITISCTGTSSDVGGYNYVSWYQQHPGKAPKLMIYEVSNRPSGVSNRFSGSKSGNTASLTISGLQAEDEADYYCSSYTSSSTLVFGCGTKLTVLSGGGGSEVQLVESGGGLVQPGGSLKLSCAASGFTFNKYAMNWVRQAPGKGLEWVARIRSKYNNYATYYADSVKDRFTISRDDSKNTAYLQMNNLKTEDTAVYYCVRHGNFGNSYISYWAYWGQGTLVTVSSGGGGSGGGGSGGGGSQTVVTQEPSLTVSPGGTVTLTCGSSTGAVTSGNYPNWVQQKPGQAPRGLIGGTKFLAPGTPARFSGSLLGGKAALTLSGVQPEDEAEYYCVLWYSNRWVFGGGTKLTVLGGGGDKTHTCPPCPAPELLGGPSVFLFPPKPKDTLMISRTPEVTCVVVDVSHEDPEVKFNWYVDGVEVHNAKTKPCEEQYGSTYRCVSVLTVLHQDWLNGKEYKCKVSNKALPAPIEKTISKAKGQPREPQVYTLPPSREEMTKNQVSLTCLVKGFYPSDIAVEWESNGQPENNYKTTPPVLDSDGSFFLYSKLTVDKSRWQQGNVFSCSVMHEALHNHYTQKSLSLSPGKGGGGSGGGGSGGGGSGGGGSGGGGSGGGGSDKTHTCPPCPAPELLGGPSVFLFPPKPKDTLMISRTPEVTCVVVDVSHEDPEVKFNWYVDGVEVHNAKTKPCEEQYGSTYRCVSVLTVLHQDWLNGKEYKCKVSNKALPAPIEKTISKAKGQPREPQVYTLPPSREEMTKNQVSLTCLVKGFYPSDIAVEWESNGQPENNYKTTPPVLDSDGSFFLYSKLTVDKSRWQQGNVFSCSVMHEALHNHYTQKSLSLSPGK

SEQ ID NO: 228 - protein, 990 aa, Artificial Sequence
  Synthetic
QVQLVESGGGVVQPGRSLRLSCAASGFTFSAYGMHWVRQAPGKCLEWVAVILYDGSNKYYADSVKGRFTISRDNSKNTLYLQMNSLRAEDTAVYYCARGSGWLQLGDYFDYWGQGTLVTVSSGGGGSGGGGSGGGGSQSALTQPPSVSGSPGQSITISCTGTSSDVGGYNYVSWYQQHPGKAPKLMIYEVSNRPSGVSNRFSGSKSGNTASLTISGLQAEDEADYYCSSYTSSSTLVFGCGTKLTVLSGGGGSEVQLVESGGGLVQPGGSLKLSCAASGFTFNKYAINWVRQAPGKGLEWVARIRSKYNNYATYYADAVKDRFTISRDDSKNTVYLQMNNLKTEDTAVYYCARAGNFGSSYISYWAYWGQGTLVTVSSGGGGSGGGGSGGGGSQTVVTQEPSLTVSPGGTVTITCGSSTGAVTSGNYPNWVQKKPGQAPRGLIGGTKFLAPGTPARFSGSLSGGKAALTLSGVQPEDEAEYYCVLWYSNRWVFGSGTKLTVLGGGGDKTHTCPPCPAPELLGGPSVFLFPPKPKDTLMISRTPEVTCVVVDVSHEDPEVKFNWYVDGVEVHNAKTKPCEEQYGSTYRCVSVLTVLHQDWLNGKEYKCKVSNKALPAPIEKTISKAKGQPREPQVYTLPPSREEMTKNQVSLTCLVKGFYPSDIAVEWESNGQPENNYKTTPPVLDSDGSFFLYSKLTVDKSRWQQGNVFSCSVMHEALHNHYTQKSLSLSPGKGGGGSGGGGSGGGGSGGGGSGGGGSGGGGSDKTHTCPPCPAPELLGGPSVFLFPPKPKDTLMISRTPEVTCVVVDVSHEDPEVKFNWYVDGVEVHNAKTKPCEEQYGSTYRCVSVLTVLHQDWLNGKEYKCKVSNKALPAPIEKTISKAKGQPREPQVYTLPPSREEMTKNQVSLTCLVKGFYPSDIAVEWESNGQPENNYKTTPPVLDSDGSFFLYSKLTVDKSRWQQGNVFSCSVMHEALHNHYTQKSLSLSPGK

SEQ ID NO: 229 - protein, 496 aa, Artificial Sequence
  Synthetic
EVQLVESGGGLVQPDRSLRLSCAASGFTFRDYAMHWVRQAPGKCLEWVSGIAWNSDSIGYADSVKGRFTISRDNAKNSLFLQMHSLRPEDTALYFCAKDTLYGSGSPRAFDIWGQGTMVTVSSGGGGSGGGGSGGGGSEIVLTQSPATLSVSPGERATLSCRASQSVNNNLAWYQQKPGQAPRLLIYGASTRATGIPARFSGSGSGTEFTLTISRLEPEDFAVYYCQQSNNWPITFGCGTRLEIKSGGGGSQVQLVQSGAEVKKPGASVKVSCKASGYTFTSYGISWVRQAPGQCLEWMGWISAYNGNTIYAQKFQGRVTLTRDTSTSTAYMELRSLRSDDTAMYYCARDPDYYGSGSYSDYWGQGTLVTVSSGGGGSGGGGSGGGGSEIVLTQSPATLSVSPGERATLSCRASQSVSSNLAWYQQKPGQAPRLLIYGASSRATGIPARFSGSGSGTEFTLTISSLQSEDFAVYYCQQYHSWPLLTFGCGTKVEIK

SEQ ID NO: 230 - protein, 496 aa, Artificial Sequence
  Synthetic
EVQLVESGGGLVQPDRSLRLSCAASGFTFRDYAMHWVRQAPGKCLEWVSGIAWNSDSIGYADSVKGRFTISRDNAKNSLFLQMHSLRPEDTALYFCAKDTLYGSGSPRAFDIWGQGTMVTVSSGGGGQGGGGQGGGGQEIVLTQSPATLSVSPGERATLSCRASQSVNNNLAWYQQKPGQAPRLLIYGASTRATGIPARFSGSGSGTEFTLTISRLEPEDFAVYYCQQSNNWPITFGCGTRLEIKSGGGGQQVQLVQSGAEVKKPGASVKVSCKASGYTFTSYGISWVRQAPGQCLEWMGWISAYNGNTIYAQKFQGRVTLTRDTSTSTAYMELRSLRSDDTAMYYCARDPDYYGSGSYSDYWGQGTLVTVSSGGGGQGGGGQGGGGQEIVLTQSPATLSVSPGERATLSCRASQSVSSNLAWYQQKPGQAPRLLIYGASSRATGIPARFSGSGSGTEFTLTISSLQSEDFAVYYCQQYHSWPLLTFGCGTKVEIK

SEQ ID NO: 231 - protein, 751 aa, Artificial Sequence
  Synthetic
EVQLVESGGGLVQPDRSLRLSCAASGFTFRDYAMHWVRQAPGKCLEWVSGIAWNSDSIGYADSVKGRFTISRDNAKNSLFLQMHSLRPEDTALYFCAKDTLYGSGSPRAFDIWGQGTMVTVSSGGGGSGGGGSGGGGSEIVLTQSPATLSVSPGERATLSCRASQSVNNNLAWYQQKPGQAPRLLIYGASTRATGIPARFSGSGSGTEFTLTISRLEPEDFAVYYCQQSNNWPITFGCGTRLEIKSGGGGSQVQLVQSGAEVKKPGASVKVSCKASGYTFTSYGISWVRQAPGQCLEWMGWISAYNGNTIYAQKFQGRVTLTRDTSTSTAYMELRSLRSDDTAMYYCARDPDYYGSGSYSDYWGQGTLVTVSSGGGGSGGGGSGGGGSEIVLTQSPATLSVSPGERATLSCRASQSVSSNLAWYQQKPGQAPRLLIYGASSRATGIPARFSGSGSGTEFTLTISSLQSEDFAVYYCQQYHSWPLLTFGCGTKVEIKSGGGGSEVQLVESGGGLVQPGGSLKLSCAASGFTFNKYAMNWVRQAPGKGLEWVARIRSKYNNYATYYADSVKDRFTISRDDSKNTAYLQMNNLKTEDTAVYYCVRHGNFGNSYISYWAYWGQGTLVTVSSGGGGSGGGGSGGGGSQTVVTQEPSLTVSPGGTVTLTCGSSTGAVTSGNYPNWVQQKPGQAPRGLIGGTKFLAPGTPARFSGSLLGGKAALTLSGVQPEDEAEYYCVLWYSNRWVFGGGTKLTVL

SEQ ID NO: 232 - protein, 751 aa, Artificial Sequence
  Synthetic
EVQLVESGGGLVQPDRSLRLSCAASGFTFRDYAMHWVRQAPGKCLEWVSGIAWNSDSIGYADSVKGRFTISRDNAKNSLFLQMHSLRPEDTALYFCAKDTLYGSGSPRAFDIWGQGTMVTVSSGGGGQGGGGQGGGGQEIVLTQSPATLSVSPGERATLSCRASQSVNNNLAWYQQKPGQAPRLLIYGASTRATGIPARFSGSGSGTEFTLTISRLEPEDFAVYYCQQSNNWPITFGCGTRLEIKSGGGGQQVQLVQSGAEVKKPGASVKVSCKASGYTFTSYGISWVRQAPGQCLEWMGWISAYNGNTIYAQKFQGRVTLTRDTSTSTAYMELRSLRSDDTAMYYCARDPDYYGSGSYSDYWGQGTLVTVSSGGGGQGGGGQGGGGQEIVLTQSPATLSVSPGERATLSCRASQSVSSNLAWYQQKPGQAPRLLIYGASSRATGIPARFSGSGSGTEFTLTISSLQSEDFAVYYCQQYHSWPLLTFGCGTKVEIKSGGGGQEVQLVESGGGLVQPGGSLKLSCAASGFTFNKYAMNWVRQAPGKGLEWVARIRSKYNNYATYYADSVKDRFTISRDDSKNTAYLQMNNLKTEDTAVYYCVRHGNFGNSYISYWAYWGQGTLVTVSSGGGGQGGGGQGGGGQQTVVTQEPSLTVSPGGTVTLTCGSSTGAVTSGNYPNWVQQKPGQAPRGLIGGTKFLAPGTPARFSGSLLGGKAALTLSGVQPEDEAEYYCVLWYSNRWVFGGGTKLTVL

SEQ ID NO: 233 - protein, 751 aa, Artificial Sequence
  Synthetic
EVQLVESGGGLVQPDRSLRLSCAASGFTFRDYAMHWVRQAPGKCLEWVSGIAWNSDSIGYADSVKGRFTISRDNAKNSLFLQMHSLRPEDTALYFCAKDTLYGSGSPRAFDIWGQGTMVTVSSGGGGSGGGGSGGGGSEIVLTQSPATLSVSPGERATLSCRASQSVNNNLAWYQQKPGQAPRLLIYGASTRATGIPARFSGSGSGTEFTLTISRLEPEDFAVYYCQQSNNWPITFGCGTRLEIKSGGGGSQVQLVQSGAEVKKPGASVKVSCKASGYTFTSYGISWVRQAPGQCLEWMGWISAYNGNTIYAQKFQGRVTLTRDTSTSTAYMELRSLRSDDTAMYYCARDPDYYGSGSYSDYWGQGTLVTVSSGGGGSGGGGSGGGGSEIVLTQSPATLSVSPGERATLSCRASQSVSSNLAWYQQKPGQAPRLLIYGASSRATGIPARFSGSGSGTEFTLTISSLQSEDFAVYYCQQYHSWPLLTFGCGTKVEIKSGGGGSEVQLVESGGGLVQPGGSLKLSCAASGFTFNKYAINWVRQAPGKGLEWVARIRSKYNNYATYYADAVKDRFTISRDDSKNTVYLQMNNLKTEDTAVYYCARAGNFGSSYISYWAYWGQGTLVTVSSGGGGSGGGGSGGGGSQTVVTQEPSLTVSPGGTVTITCGSSTGAVTSGNYPNWVQKKPGQAPRGLIGGTKFLAPGTPARFSGSLSGGKAALTLSGVQPEDEAEYYCVLWYSNRWVFGSGTKLTVL

SEQ ID NO: 234 - protein, 751 aa, Artificial Sequence
  Synthetic
EVQLVESGGGLVQPDRSLRLSCAASGFTFRDYAMHWVRQAPGKCLEWVSGIAWNSDSIGYADSVKGRFTISRDNAKNSLFLQMHSLRPEDTALYFCAKDTLYGSGSPRAFDIWGQGTMVTVSSGGGGQGGGGQGGGGQEIVLTQSPATLSVSPGERATLSCRASQSVNNNLAWYQQKPGQAPRLLIYGASTRATGIPARFSGSGSGTEFTLTISRLEPEDFAVYYCQQSNNWPITFGCGTRLEIKSGGGGQQVQLVQSGAEVKKPGASVKVSCKASGYTFTSYGISWVRQAPGQCLEWMGWISAYNGNTIYAQKFQGRVTLTRDTSTSTAYMELRSLRSDDTAMYYCARDPDYYGSGSYSDYWGQGTLVTVSSGGGGQGGGGQGGGGQEIVLTQSPATLSVSPGERATLSCRASQSVSSNLAWYQQKPGQAPRLLIYGASSRATGIPARFSGSGSGTEFTLTISSLQSEDFAVYYCQQYHSWPLLTFGCGTKVEIKSGGGGQEVQLVESGGGLVQPGGSLKLSCAASGFTFNKYAINWVRQAPGKGLEWVARIRSKYNNYATYYADAVKDRFTISRDDSKNTVYLQMNNLKTEDTAVYYCARAGNFGSSYISYWAYWGQGTLVTVSSGGGGQGGGGQGGGGQQTVVTQEPSLTVSPGGTVTITCGSSTGAVTSGNYPNWVQKKPGQAPRGLIGGTKFLAPGTPARFSGSLSGGKAALTLSGVQPEDEAEYYCVLWYSNRWVFGSGTKLTVL

SEQ ID NO: 235 - protein, 1239 aa, Artificial Sequence
  Synthetic
EVQLVESGGGLVQPDRSLRLSCAASGFTFRDYAMHWVRQAPGKCLEWVSGIAWNSDSIGYADSVKGRFTISRDNAKNSLFLQMHSLRPEDTALYFCAKDTLYGSGSPRAFDIWGQGTMVTVSSGGGGSGGGGSGGGGSEIVLTQSPATLSVSPGERATLSCRASQSVNNNLAWYQQKPGQAPRLLIYGASTRATGIPARFSGSGSGTEFTLTISRLEPEDFAVYYCQQSNNWPITFGCGTRLEIKSGGGGSQVQLVQSGAEVKKPGASVKVSCKASGYTFTSYGISWVRQAPGQCLEWMGWISAYNGNTIYAQKFQGRVTLTRDTSTSTAYMELRSLRSDDTAMYYCARDPDYYGSGSYSDYWGQGTLVTVSSGGGGSGGGGSGGGGSEIVLTQSPATLSVSPGERATLSCRASQSVSSNLAWYQQKPGQAPRLLIYGASSRATGIPARFSGSGSGTEFTLTISSLQSEDFAVYYCQQYHSWPLLTFGCGTKVEIKSGGGGSEVQLVESGGGLVQPGGSLKLSCAASGFTFNKYAMNWVRQAPGKGLEWVARIRSKYNNYATYYADSVKDRFTISRDDSKNTAYLQMNNLKTEDTAVYYCVRHGNFGNSYISYWAYWGQGTLVTVSSGGGGSGGGGSGGGGSQTVVTQEPSLTVSPGGTVTLTCGSSTGAVTSGNYPNWVQQKPGQAPRGLIGGTKFLAPGTPARFSGSLLGGKAALTLSGVQPEDEAEYYCVLWYSNRWVFGGGTKLTVLGGGGDKTHTCPPCPAPELLGGPSVFLFPPKPKDTLMISRTPEVTCVVVDVSHEDPEVKFNWYVDGVEVHNAKTKPCEEQYGSTYRCVSVLTVLHQDWLNGKEYKCKVSNKALPAPIEKTISKAKGQPREPQVYTLPPSREEMTKNQVSLTCLVKGFYPSDIAVEWESNGQPENNYKTTPPVLDSDGSFFLYSKLTVDKSRWQQGNVFSCSVMHEALHNHYTQKSLSLSPGKGGGGSGGGGSGGGGSGGGGSGGGGSGGGGSDKTHTCPPCPAPELLGGPSVFLFPPKPKDTLMISRTPEVTCVVVDVSHEDPEVKFNWYVDGVEVHNAKTKPCEEQYGSTYRCVSVLTVLHQDWLNGKEYKCKVSNKALPAPIEKTISKAKGQPREPQVYTLPPSREEMTKNQVSLTCLVKGFYPSDIAVEWESNGQPENNYKTTPPVLDSDGSFFLYSKLTVDKSRWQQGNVFSCSVMHEALHNHYTQKSLSLSPGK

SEQ ID NO: 236 - protein, 1229 aa, Artificial Sequence
  Synthetic
EVQLVESGGGLVQPDRSLRLSCAASGFTFRDYAMHWVRQAPGKCLEWVSGIAWNSDSIGYADSVKGRFTISRDNAKNSLFLQMHSLRPEDTALYFCAKDTLYGSGSPRAFDIWGQGTMVTVSSGGGGQGGGGQGGGGQEIVLTQSPATLSVSPGERATLSCRASQSVNNNLAWYQQKPGQAPRLLIYGASTRATGIPARFSGSGSGTEFTLTISRLEPEDFAVYYCQQSNNWPITFGCGTRLEIKSGGGGQQVQLVQSGAEVKKPGASVKVSCKASGYTFTSYGISWVRQAPGQCLEWMGWISAYNGNTIYAQKFQGRVTLTRDTSTSTAYMELRSLRSDDTAMYYCARDPDYYGSGSYSDYWGQGTLVTVSSGGGGQGGGGQGGGGQEIVLTQSPATLSVSPGERATLSCRASQSVSSNLAWYQQKPGQAPRLLIYGASSRATGIPARFSGSGSGTEFTLTISSLQSEDFAVYYCQQYHSWPLLTFGCGTKVEIKSGGGGQEVQLVESGGGLVQPGGSLKLSCAASGFTFNKYAMNWVRQAPGKGLEWVARIRSKYNNYATYYADSVKDRFTISRDDSKNTAYLQMNNLKTEDTAVYYCVRHGNFGNSYISYWAYWGQGTLVTVSSGGGGQGGGGQGGGGQQTVVTQEPSLTVSPGGTVTLTCGSSTGAVTSGNYPNWVQQKPGQAPRGLIGGTKFLAPGTPARFSGSLLGGKAALTLSGVQPEDEAEYYCVLWYSNRWVFGGGTKLTVLGGGGCPPCPAPELLGGPSVFLFPPKPKDTLMISRTPEVTCVVVDVSHEEPEVKFNWYVDGVEVHNAKTKPCEEQYGSTYRCVSVLTVLHQDWLNGKEYKCKVSNKALPAPIEKTISKAKGQPREPQVYTLPPSREEMTKNQVSLTCLVKGFYPSDIAVEWESNGQPENNYKTTPPVLDSDGSFFLYSKLTVDKSRWQQGNVFSCSVMHEALHNHYTQKSLSLSPGKGGGGQGGGGQGGGGQGGGGQGGGGQGGGGQCPPCPAPELLGGPSVFLFPPKPKDTLMISRTPEVTCVVVDVSHEEPEVKFNWYVDGVEVHNAKTKPCEEQYGSTYRCVSVLTVLHQDWLNGKEYKCKVSNKALPAPIEKTISKAKGQPREPQVYTLPPSREEMTKNQVSLTCLVKGFYPSDIAVEWESNGQPENNYKTTPPVLDSDGSFFLYSKLTVDKSRWQQGNVFSCSVMHEALHNHYTQKSLSLSPGK

SEQ ID NO: 237 - protein, 1239 aa, Artificial Sequence
  Synthetic
EVQLVESGGGLVQPDRSLRLSCAASGFTFRDYAMHWVRQAPGKCLEWVSGIAWNSDSIGYADSVKGRFTISRDNAKNSLFLQMHSLRPEDTALYFCAKDTLYGSGSPRAFDIWGQGTMVTVSSGGGGSGGGGSGGGGSEIVLTQSPATLSVSPGERATLSCRASQSVNNNLAWYQQKPGQAPRLLIYGASTRATGIPARFSGSGSGTEFTLTISRLEPEDFAVYYCQQSNNWPITFGCGTRLEIKSGGGGSQVQLVQSGAEVKKPGASVKVSCKASGYTFTSYGISWVRQAPGQCLEWMGWISAYNGNTIYAQKFQGRVTLTRDTSTSTAYMELRSLRSDDTAMYYCARDPDYYGSGSYSDYWGQGTLVTVSSGGGGSGGGGSGGGGSEIVLTQSPATLSVSPGERATLSCRASQSVSSNLAWYQQKPGQAPRLLIYGASSRATGIPARFSGSGSGTEFTLTISSLQSEDFAVYYCQQYHSWPLLTFGCGTKVEIKSGGGGSEVQLVESGGGLVQPGGSLKLSCAASGFTFNKYAINWVRQAPGKGLEWVARIRSKYNNYATYYADAVKDRFTISRDDSKNTVYLQMNNLKTEDTAVYYCARAGNFGSSYISYWAYWGQGTLVTVSSGGGGSGGGGSGGGGSQTVVTQEPSLTVSPGGTVTITCGSSTGAVTSGNYPNWVQKKPGQAPRGLIGGTKFLAPGTPARFSGSLSGGKAALTLSGVQPEDEAEYYCVLWYSNRWVFGSGTKLTVLGGGGDKTHTCPPCPAPELLGGPSVFLFPPKPKDTLMISRTPEVTCVVVDVSHEDPEVKFNWYVDGVEVHNAKTKPCEEQYGSTYRCVSVLTVLHQDWLNGKEYKCKVSNKALPAPIEKTISKAKGQPREPQVYTLPPSREEMTKNQVSLTCLVKGFYPSDIAVEWESNGQPENNYKTTPPVLDSDGSFFLYSKLTVDKSRWQQGNVFSCSVMHEALHNHYTQKSLSLSPGKGGGGSGGGGSGGGGSGGGGSGGGGSGGGGSDKTHTCPPCPAPELLGGPSVFLFPPKPKDTLMISRTPEVTCVVVDVSHEDPEVKFNWYVDGVEVHNAKTKPCEEQYGSTYRCVSVLTVLHQDWLNGKEYKCKVSNKALPAPIEKTISKAKGQPREPQVYTLPPSREEMTKNQVSLTCLVKGFYPSDIAVEWESNGQPENNYKTTPPVLDSDGSFFLYSKLTVDKSRWQQGNVFSCSVMHEALHNHYTQKSLSLSPGK

SEQ ID NO: 238 - protein, 1229 aa, Artificial Sequence
  Synthetic
EVQLVESGGGLVQPDRSLRLSCAASGFTFRDYAMHWVRQAPGKCLEWVSGIAWNSDSIGYADSVKGRFTISRDNAKNSLFLQMHSLRPEDTALYFCAKDTLYGSGSPRAFDIWGQGTMVTVSSGGGGQGGGGQGGGGQEIVLTQSPATLSVSPGERATLSCRASQSVNNNLAWYQQKPGQAPRLLIYGASTRATGIPARFSGSGSGTEFTLTISRLEPEDFAVYYCQQSNNWPITFGCGTRLEIKSGGGGQQVQLVQSGAEVKKPGASVKVSCKASGYTFTSYGISWVRQAPGQCLEWMGWISAYNGNTIYAQKFQGRVTLTRDTSTSTAYMELRSLRSDDTAMYYCARDPDYYGSGSYSDYWGQGTLVTVSSGGGGQGGGGQGGGGQEIVLTQSPATLSVSPGERATLSCRASQSVSSNLAWYQQKPGQAPRLLIYGASSRATGIPARFSGSGSGTEFTLTISSLQSEDFAVYYCQQYHSWPLLTFGCGTKVEIKSGGGGQEVQLVESGGGLVQPGGSLKLSCAASGFTFNKYAINWVRQAPGKGLEWVARIRSKYNNYATYYADAVKDRFTISRDDSKNTVYLQMNNLKTEDTAVYYCARAGNFGSSYISYWAYWGQGTLVTVSSGGGGQGGGGQGGGGQQTVVTQEPSLTVSPGGTVTITCGSSTGAVTSGNYPNWVQKKPGQAPRGLIGGTKFLAPGTPARFSGSLSGGKAALTLSGVQPEDEAEYYCVLWYSNRWVFGSGTKLTVLGGGGCPPCPAPELLGGPSVFLFPPKPKDTLMISRTPEVTCVVVDVSHEEPEVKFNWYVDGVEVHNAKTKPCEEQYGSTYRCVSVLTVLHQDWLNGKEYKCKVSNKALPAPIEKTISKAKGQPREPQVYTLPPSREEMTKNQVSLTCLVKGFYPSDIAVEWESNGQPENNYKTTPPVLDSDGSFFLYSKLTVDKSRWQQGNVFSCSVMHEALHNHYTQKSLSLSPGKGGGGQGGGGQGGGGQGGGGQGGGGQGGGGQCPPCPAPELLGGPSVFLFPPKPKDTLMISRTPEVTCVVVDVSHEEPEVKFNWYVDGVEVHNAKTKPCEEQYGSTYRCVSVLTVLHQDWLNGKEYKCKVSNKALPAPIEKTISKAKGQPREPQVYTLPPSREEMTKNQVSLTCLVKGFYPSDIAVEWESNGQPENNYKTTPPVLDSDGSFFLYSKLTVDKSRWQQGNVFSCSVMHEALHNHYTQKSLSLSPGK

SEQ ID NO: 239 - protein, 496 aa, Artificial Sequence
  Synthetic
EVQLVESGGGLVQPDRSLRLSCAASGFTFRDYAMHWVRQAPGKCLEWVSGIAWNSDSIGYADSVKGRFTISRDNAKNSLFLQMHSLRPEDTALYFCAKDTLYGSGSPRAFDIWGQGTMVTVSSGGGGSGGGGSGGGGSEIVLTQSPATLSVSPGERATLSCRASQSVNNNLAWYQQKPGQAPRLLIYGASTRATGIPARFSGSGSGTEFTLTISRLEPEDFAVYYCQQSNNWPITFGCGTRLEIKSGGGGSQVQLVQSGAEVKKPGASVKVSCKASGYTFTTYGISWVRQAPGQCLEWMGWISPKNGVTTYAQKFQGRVTITADESTSTAYMELSRLTSDDTAMYYCARDPDYYGSGSYSDYWGQGTLVTVSSGGGGSGGGGSGGGGSEIVLTQSPATLSVSPGERATLSCRASQSVSSNLAWYQQKPGQAPRLLIYGASSRATGIPARFSGSGSGTEFTLTISSLQSEDFAVYYCQQYHSWPLLTFGCGTKVEIK

SEQ ID NO: 240 - protein, 496 aa, Artificial Sequence
  Synthetic
EVQLVESGGGLVQPDRSLRLSCAASGFTFRDYAMHWVRQAPGKCLEWVSGIAWNSDSIGYADSVKGRFTISRDNAKNSLFLQMHSLRPEDTALYFCAKDTLYGSGSPRAFDIWGQGTMVTVSSGGGGQGGGGQGGGGQEIVLTQSPATLSVSPGERATLSCRASQSVNNNLAWYQQKPGQAPRLLIYGASTRATGIPARFSGSGSGTEFTLTISRLEPEDFAVYYCQQSNNWPITFGCGTRLEIKSGGGGQQVQLVQSGAEVKKPGASVKVSCKASGYTFTTYGISWVRQAPGQCLEWMGWISPKNGVTTYAQKFQGRVTITADESTSTAYMELSRLTSDDTAMYYCARDPDYYGSGSYSDYWGQGTLVTVSSGGGGQGGGGQGGGGQEIVLTQSPATLSVSPGERATLSCRASQSVSSNLAWYQQKPGQAPRLLIYGASSRATGIPARFSGSGSGTEFTLTISSLQSEDFAVYYCQQYHSWPLLTFGCGTKVEIK

SEQ ID NO: 241 - protein, 751 aa, Artificial Sequence
  Synthetic
EVQLVESGGGLVQPDRSLRLSCAASGFTFRDYAMHWVRQAPGKCLEWVSGIAWNSDSIGYADSVKGRFTISRDNAKNSLFLQMHSLRPEDTALYFCAKDTLYGSGSPRAFDIWGQGTMVTVSSGGGGSGGGGSGGGGSEIVLTQSPATLSVSPGERATLSCRASQSVNNNLAWYQQKPGQAPRLLIYGASTRATGIPARFSGSGSGTEFTLTISRLEPEDFAVYYCQQSNNWPITFGCGTRLEIKSGGGGSQVQLVQSGAEVKKPGASVKVSCKASGYTFTTYGISWVRQAPGQCLEWMGWISPKNGVTTYAQKFQGRVTITADESTSTAYMELSRLTSDDTAMYYCARDPDYYGSGSYSDYWGQGTLVTVSSGGGGSGGGGSGGGGSEIVLTQSPATLSVSPGERATLSCRASQSVSSNLAWYQQKPGQAPRLLIYGASSRATGIPARFSGSGSGTEFTLTISSLQSEDFAVYYCQQYHSWPLLTFGCGTKVEIKSGGGGSEVQLVESGGGLVQPGGSLKLSCAASGFTFNKYAMNWVRQAPGKGLEWVARIRSKYNNYATYYADSVKDRFTISRDDSKNTAYLQMNNLKTEDTAVYYCVRHGNFGNSYISYWAYWGQGTLVTVSSGGGGSGGGGSGGGGSQTVVTQEPSLTVSPGGTVTLTCGSSTGAVTSGNYPNWVQQKPGQAPRGLIGGTKFLAPGTPARFSGSLLGGKAALTLSGVQPEDEAEYYCVLWYSNRWVFGGGTKLTVL

SEQ ID NO: 242 - protein, 751 aa, Artificial Sequence
  Synthetic
EVQLVESGGGLVQPDRSLRLSCAASGFTFRDYAMHWVRQAPGKCLEWVSGIAWNSDSIGYADSVKGRFTISRDNAKNSLFLQMHSLRPEDTALYFCAKDTLYGSGSPRAFDIWGQGTMVTVSSGGGGQGGGGQGGGGQEIVLTQSPATLSVSPGERATLSCRASQSVNNNLAWYQQKPGQAPRLLIYGASTRATGIPARFSGSGSGTEFTLTISRLEPEDFAVYYCQQSNNWPITFGCGTRLEIKSGGGGQQVQLVQSGAEVKKPGASVKVSCKASGYTFTTYGISWVRQAPGQCLEWMGWISPKNGVTTYAQKFQGRVTITADESTSTAYMELSRLTSDDTAMYYCARDPDYYGSGSYSDYWGQGTLVTVSSGGGGQGGGGQGGGGQEIVLTQSPATLSVSPGERATLSCRASQSVSSNLAWYQQKPGQAPRLLIYGASSRATGIPARFSGSGSGTEFTLTISSLQSEDFAVYYCQQYHSWPLLTFGCGTKVEIKSGGGGQEVQLVESGGGLVQPGGSLKLSCAASGFTFNKYAMNWVRQAPGKGLEWVARIRSKYNNYATYYADSVKDRFTISRDDSKNTAYLQMNNLKTEDTAVYYCVRHGNFGNSYISYWAYWGQGTLVTVSSGGGGQGGGGQGGGGQQTVVTQEPSLTVSPGGTVTLTCGSSTGAVTSGNYPNWVQQKPGQAPRGLIGGTKFLAPGTPARFSGSLLGGKAALTLSGVQPEDEAEYYCVLWYSNRWVFGGGTKLTVL

SEQ ID NO: 243 - protein, 751 aa, Artificial Sequence
  Synthetic
EVQLVESGGGLVQPDRSLRLSCAASGFTFRDYAMHWVRQAPGKCLEWVSGIAWNSDSIGYADSVKGRFTISRDNAKNSLFLQMHSLRPEDTALYFCAKDTLYGSGSPRAFDIWGQGTMVTVSSGGGGSGGGGSGGGGSEIVLTQSPATLSVSPGERATLSCRASQSVNNNLAWYQQKPGQAPRLLIYGASTRATGIPARFSGSGSGTEFTLTISRLEPEDFAVYYCQQSNNWPITFGCGTRLEIKSGGGGSQVQLVQSGAEVKKPGASVKVSCKASGYTFTTYGISWVRQAPGQCLEWMGWISPKNGVTTYAQKFQGRVTITADESTSTAYMELSRLTSDDTAMYYCARDPDYYGSGSYSDYWGQGTLVTVSSGGGGSGGGGSGGGGSEIVLTQSPATLSVSPGERATLSCRASQSVSSNLAWYQQKPGQAPRLLIYGASSRATGIPARFSGSGSGTEFTLTISSLQSEDFAVYYCQQYHSWPLLTFGCGTKVEIKSGGGGSEVQLVESGGGLVQPGGSLKLSCAASGFTFNKYAINWVRQAPGKGLEWVARIRSKYNNYATYYADAVKDRFTISRDDSKNTVYLQMNNLKTEDTAVYYCARAGNFGSSYISYWAYWGQGTLVTVSSGGGGSGGGGSGGGGSQTVVTQEPSLTVSPGGTVTITCGSSTGAVTSGNYPNWVQKKPGQAPRGLIGGTKFLAPGTPARFSGSLSGGKAALTLSGVQPEDEAEYYCVLWYSNRWVFGSGTKLTVL

SEQ ID NO: 244 - protein, 751 aa, Artificial Sequence
  Synthetic
EVQLVESGGGLVQPDRSLRLSCAASGFTFRDYAMHWVRQAPGKCLEWVSGIAWNSDSIGYADSVKGRFTISRDNAKNSLFLQMHSLRPEDTALYFCAKDTLYGSGSPRAFDIWGQGTMVTVSSGGGGQGGGGQGGGGQEIVLTQSPATLSVSPGERATLSCRASQSVNNNLAWYQQKPGQAPRLLIYGASTRATGIPARFSGSGSGTEFTLTISRLEPEDFAVYYCQQSNNWPITFGCGTRLEIKSGGGGQQVQLVQSGAEVKKPGASVKVSCKASGYTFTTYGISWVRQAPGQCLEWMGWISPKNGVTTYAQKFQGRVTITADESTSTAYMELSRLTSDDTAMYYCARDPDYYGSGSYSDYWGQGTLVTVSSGGGGQGGGGQGGGGQEIVLTQSPATLSVSPGERATLSCRASQSVSSNLAWYQQKPGQAPRLLIYGASSRATGIPARFSGSGSGTEFTLTISSLQSEDFAVYYCQQYHSWPLLTFGCGTKVEIKSGGGGQEVQLVESGGGLVQPGGSLKLSCAASGFTFNKYAINWVRQAPGKGLEWVARIRSKYNNYATYYADAVKDRFTISRDDSKNTVYLQMNNLKTEDTAVYYCARAGNFGSSYISYWAYWGQGTLVTVSSGGGGQGGGGQGGGGQQTVVTQEPSLTVSPGGTVTITCGSSTGAVTSGNYPNWVQKKPGQAPRGLIGGTKFLAPGTPARFSGSLSGGKAALTLSGVQPEDEAEYYCVLWYSNRWVFGSGTKLTVL

SEQ ID NO: 245 - protein, 1239 aa, Artificial Sequence
  Synthetic
EVQLVESGGGLVQPDRSLRLSCAASGFTFRDYAMHWVRQAPGKCLEWVSGIAWNSDSIGYADSVKGRFTISRDNAKNSLFLQMHSLRPEDTALYFCAKDTLYGSGSPRAFDIWGQGTMVTVSSGGGGSGGGGSGGGGSEIVLTQSPATLSVSPGERATLSCRASQSVNNNLAWYQQKPGQAPRLLIYGASTRATGIPARFSGSGSGTEFTLTISRLEPEDFAVYYCQQSNNWPITFGCGTRLEIKSGGGGSQVQLVQSGAEVKKPGASVKVSCKASGYTFTTYGISWVRQAPGQCLEWMGWISPKNGVTTYAQKFQGRVTITADESTSTAYMELSRLTSDDTAMYYCARDPDYYGSGSYSDYWGQGTLVTVSSGGGGSGGGGSGGGGSEIVLTQSPATLSVSPGERATLSCRASQSVSSNLAWYQQKPGQAPRLLIYGASSRATGIPARFSGSGSGTEFTLTISSLQSEDFAVYYCQQYHSWPLLTFGCGTKVEIKSGGGGSEVQLVESGGGLVQPGGSLKLSCAASGFTFNKYAMNWVRQAPGKGLEWVARIRSKYNNYATYYADSVKDRFTISRDDSKNTAYLQMNNLKTEDTAVYYCVRHGNFGNSYISYWAYWGQGTLVTVSSGGGGSGGGGSGGGGSQTVVTQEPSLTVSPGGTVTLTCGSSTGAVTSGNYPNWVQQKPGQAPRGLIGGTKFLAPGTPARFSGSLLGGKAALTLSGVQPEDEAEYYCVLWYSNRWVFGGGTKLTVLGGGGDKTHTCPPCPAPELLGGPSVFLFPPKPKDTLMISRTPEVTCVVVDVSHEDPEVKFNWYVDGVEVHNAKTKPCEEQYGSTYRCVSVLTVLHQDWLNGKEYKCKVSNKALPAPIEKTISKAKGQPREPQVYTLPPSREEMTKNQVSLTCLVKGFYPSDIAVEWESNGQPENNYKTTPPVLDSDGSFFLYSKLTVDKSRWQQGNVFSCSVMHEALHNHYTQKSLSLSPGKGGGGSGGGGSGGGGSGGGGSGGGGSGGGGSDKTHTCPPCPAPELLGGPSVFLFPPKPKDTLMISRTPEVTCVVVDVSHEDPEVKFNWYVDGVEVHNAKTKPCEEQYGSTYRCVSVLTVLHQDWLNGKEYKCKVSNKALPAPIEKTISKAKGQPREPQVYTLPPSREEMTKNQVSLTCLVKGFYPSDIAVEWESNGQPENNYKTTPPVLDSDGSFFLYSKLTVDKSRWQQGNVFSCSVMHEALHNHYTQKSLSLSPGK

SEQ ID NO: 246 - protein, 1229 aa, Artificial Sequence
  Synthetic
EVQLVESGGGLVQPDRSLRLSCAASGFTFRDYAMHWVRQAPGKCLEWVSGIAWNSDSIGYADSVKGRFTISRDNAKNSLFLQMHSLRPEDTALYFCAKDTLYGSGSPRAFDIWGQGTMVTVSSGGGGQGGGGQGGGGQEIVLTQSPATLSVSPGERATLSCRASQSVNNNLAWYQQKPGQAPRLLIYGASTRATGIPARFSGSGSGTEFTLTISRLEPEDFAVYYCQQSNNWPITFGCGTRLEIKSGGGGQQVQLVQSGAEVKKPGASVKVSCKASGYTFTTYGISWVRQAPGQCLEWMGWISPKNGVTTYAQKFQGRVTITADESTSTAYMELSRLTSDDTAMYYCARDPDYYGSGSYSDYWGQGTLVTVSSGGGGQGGGGQGGGGQEIVLTQSPATLSVSPGERATLSCRASQSVSSNLAWYQQKPGQAPRLLIYGASSRATGIPARFSGSGSGTEFTLTISSLQSEDFAVYYCQQYHSWPLLTFGCGTKVEIKSGGGGQEVQLVESGGGLVQPGGSLKLSCAASGFTFNKYAMNWVRQAPGKGLEWVARIRSKYNNYATYYADSVKDRFTISRDDSKNTAYLQMNNLKTEDTAVYYCVRHGNFGNSYISYWAYWGQGTLVTVSSGGGGQGGGGQGGGGQQTVVTQEPSLTVSPGGTVTLTCGSSTGAVTSGNYPNWVQQKPGQAPRGLIGGTKFLAPGTPARFSGSLLGGKAALTLSGVQPEDEAEYYCVLWYSNRWVFGGGTKLTVLGGGGCPPCPAPELLGGPSVFLFPPKPKDTLMISRTPEVTCVVVDVSHEEPEVKFNWYVDGVEVHNAKTKPCEEQYGSTYRCVSVLTVLHQDWLNGKEYKCKVSNKALPAPIEKTISKAKGQPREPQVYTLPPSREEMTKNQVSLTCLVKGFYPSDIAVEWESNGQPENNYKTTPPVLDSDGSFFLYSKLTVDKSRWQQGNVFSCSVMHEALHNHYTQKSLSLSPGKGGGGQGGGGQGGGGQGGGGQGGGGQGGGGQCPPCPAPELLGGPSVFLFPPKPKDTLMISRTPEVTCVVVDVSHEEPEVKFNWYVDGVEVHNAKTKPCEEQYGSTYRCVSVLTVLHQDWLNGKEYKCKVSNKALPAPIEKTISKAKGQPREPQVYTLPPSREEMTKNQVSLTCLVKGFYPSDIAVEWESNGQPENNYKTTPPVLDSDGSFFLYSKLTVDKSRWQQGNVFSCSVMHEALHNHYTQKSLSLSPGK

SEQ ID NO: 247 - protein, 1239 aa, Artificial Sequence
  Synthetic
EVQLVESGGGLVQPDRSLRLSCAASGFTFRDYAMHWVRQAPGKCLEWVSGIAWNSDSIGYADSVKGRFTISRDNAKNSLFLQMHSLRPEDTALYFCAKDTLYGSGSPRAFDIWGQGTMVTVSSGGGGSGGGGSGGGGSEIVLTQSPATLSVSPGERATLSCRASQSVNNNLAWYQQKPGQAPRLLIYGASTRATGIPARFSGSGSGTEFTLTISRLEPEDFAVYYCQQSNNWPITFGCGTRLEIKSGGGGSQVQLVQSGAEVKKPGASVKVSCKASGYTFTTYGISWVRQAPGQCLEWMGWISPKNGVTTYAQKFQGRVTITADESTSTAYMELSRLTSDDTAMYYCARDPDYYGSGSYSDYWGQGTLVTVSSGGGGSGGGGSGGGGSEIVLTQSPATLSVSPGERATLSCRASQSVSSNLAWYQQKPGQAPRLLIYGASSRATGIPARFSGSGSGTEFTLTISSLQSEDFAVYYCQQYHSWPLLTFGCGTKVEIKSGGGGSEVQLVESGGGLVQPGGSLKLSCAASGFTFNKYAINWVRQAPGKGLEWVARIRSKYNNYATYYADAVKDRFTISRDDSKNTVYLQMNNLKTEDTAVYYCARAGNFGSSYISYWAYWGQGTLVTVSSGGGGSGGGGSGGGGSQTVVTQEPSLTVSPGGTVTITCGSSTGAVTSGNYPNWVQKKPGQAPRGLIGGTKFLAPGTPARFSGSLSGGKAALTLSGVQPEDEAEYYCVLWYSNRWVFGSGTKLTVLGGGGDKTHTCPPCPAPELLGGPSVFLFPPKPKDTLMISRTPEVTCVVVDVSHEDPEVKFNWYVDGVEVHNAKTKPCEEQYGSTYRCVSVLTVLHQDWLNGKEYKCKVSNKALPAPIEKTISKAKGQPREPQVYTLPPSREEMTKNQVSLTCLVKGFYPSDIAVEWESNGQPENNYKTTPPVLDSDGSFFLYSKLTVDKSRWQQGNVFSCSVMHEALHNHYTQKSLSLSPGKGGGGSGGGGSGGGGSGGGGSGGGGSGGGGSDKTHTCPPCPAPELLGGPSVFLFPPKPKDTLMISRTPEVTCVVVDVSHEDPEVKFNWYVDGVEVHNAKTKPCEEQYGSTYRCVSVLTVLHQDWLNGKEYKCKVSNKALPAPIEKTISKAKGQPREPQVYTLPPSREEMTKNQVSLTCLVKGFYPSDIAVEWESNGQPENNYKTTPPVLDSDGSFFLYSKLTVDKSRWQQGNVFSCSVMHEALHNHYTQKSLSLSPGK

SEQ ID NO: 248 - protein, 1229 aa, Artificial Sequence
  Synthetic
EVQLVESGGGLVQPDRSLRLSCAASGFTFRDYAMHWVRQAPGKCLEWVSGIAWNSDSIGYADSVKGRFTISRDNAKNSLFLQMHSLRPEDTALYFCAKDTLYGSGSPRAFDIWGQGTMVTVSSGGGGQGGGGQGGGGQEIVLTQSPATLSVSPGERATLSCRASQSVNNNLAWYQQKPGQAPRLLIYGASTRATGIPARFSGSGSGTEFTLTISRLEPEDFAVYYCQQSNNWPITFGCGTRLEIKSGGGGQQVQLVQSGAEVKKPGASVKVSCKASGYTFTTYGISWVRQAPGQCLEWMGWISPKNGVTTYAQKFQGRVTITADESTSTAYMELSRLTSDDTAMYYCARDPDYYGSGSYSDYWGQGTLVTVSSGGGGQGGGGQGGGGQEIVLTQSPATLSVSPGERATLSCRASQSVSSNLAWYQQKPGQAPRLLIYGASSRATGIPARFSGSGSGTEFTLTISSLQSEDFAVYYCQQYHSWPLLTFGCGTKVEIKSGGGGQEVQLVESGGGLVQPGGSLKLSCAASGFTFNKYAINWVRQAPGKGLEWVARIRSKYNNYATYYADAVKDRFTISRDDSKNTVYLQMNNLKTEDTAVYYCARAGNFGSSYISYWAYWGQGTLVTVSSGGGGQGGGGQGGGGQQTVVTQEPSLTVSPGGTVTITCGSSTGAVTSGNYPNWVQKKPGQAPRGLIGGTKFLAPGTPARFSGSLSGGKAALTLSGVQPEDEAEYYCVLWYSNRWVFGSGTKLTVLGGGGCPPCPAPELLGGPSVFLFPPKPKDTLMISRTPEVTCVVVDVSHEEPEVKFNWYVDGVEVHNAKTKPCEEQYGSTYRCVSVLTVLHQDWLNGKEYKCKVSNKALPAPIEKTISKAKGQPREPQVYTLPPSREEMTKNQVSLTCLVKGFYPSDIAVEWESNGQPENNYKTTPPVLDSDGSFFLYSKLTVDKSRWQQGNVFSCSVMHEALHNHYTQKSLSLSPGKGGGGQGGGGQGGGGQGGGGQGGGGQGGGGQCPPCPAPELLGGPSVFLFPPKPKDTLMISRTPEVTCVVVDVSHEEPEVKFNWYVDGVEVHNAKTKPCEEQYGSTYRCVSVLTVLHQDWLNGKEYKCKVSNKALPAPIEKTISKAKGQPREPQVYTLPPSREEMTKNQVSLTCLVKGFYPSDIAVEWESNGQPENNYKTTPPVLDSDGSFFLYSKLTVDKSRWQQGNVFSCSVMHEALHNHYTQKSLSLSPGK

SEQ ID NO: 249 - protein, 496 aa, Artificial Sequence
  Synthetic
EVQLVESGGGLVQPDRSLRLSCAASGFTFRDYAMHWVRQAPGKCLEWVSGIAWNSDSIGYADSVKGRFTISRDNAKNSLFLQMHSLRPEDTALYFCAKDTLYGSGSPRAFDIWGQGTMVTVSSGGGGSGGGGSGGGGSEIVLTQSPATLSVSPGERATLSCRASQSVNNNLAWYQQKPGQAPRLLIYGASTRATGIPARFSGSGSGTEFTLTISRLEPEDFAVYYCQQSNNWPITFGCGTRLEIKSGGGGSQVQLVQSGGEVKKPGASVKVSCKASGYTFTSYGISWVRQAPGQCLEWMGWISPQTGNAIYAQKLQGRVTMTRDTSTSTAYMELRSLRSDDTAVYYCARDPDYYGSGSYSDYWGQGTLVTVSSGGGGSGGGGSGGGGSEIVLTQSPATLSVSPGERATLSCRASQSVSSNLAWYQQKPGQAPRLLIYGASSRATGIPARFSGSGSGTEFTLTISSLQSEDFAVYYCQQYHSWPLLTFGCGTKVEIK

SEQ ID NO: 250 - protein, 496 aa, Artificial Sequence
  Synthetic
EVQLVESGGGLVQPDRSLRLSCAASGFTFRDYAMHWVRQAPGKCLEWVSGIAWNSDSIGYADSVKGRFTISRDNAKNSLFLQMHSLRPEDTALYFCAKDTLYGSGSPRAFDIWGQGTMVTVSSGGGGQGGGGQGGGGQEIVLTQSPATLSVSPGERATLSCRASQSVNNNLAWYQQKPGQAPRLLIYGASTRATGIPARFSGSGSGTEFTLTISRLEPEDFAVYYCQQSNNWPITFGCGTRLEIKSGGGGQQVQLVQSGGEVKKPGASVKVSCKASGYTFTSYGISWVRQAPGQCLEWMGWISPQTGNAIYAQKLQGRVTMTRDTSTSTAYMELRSLRSDDTAVYYCARDPDYYGSGSYSDYWGQGTLVTVSSGGGGQGGGGQGGGGQEIVLTQSPATLSVSPGERATLSCRASQSVSSNLAWYQQKPGQAPRLLIYGASSRATGIPARFSGSGSGTEFTLTISSLQSEDFAVYYCQQYHSWPLLTFGCGTKVEIK

SEQ ID NO: 251 - protein, 751 aa, Artificial Sequence
  Synthetic
EVQLVESGGGLVQPDRSLRLSCAASGFTFRDYAMHWVRQAPGKCLEWVSGIAWNSDSIGYADSVKGRFTISRDNAKNSLFLQMHSLRPEDTALYFCAKDTLYGSGSPRAFDIWGQGTMVTVSSGGGGSGGGGSGGGGSEIVLTQSPATLSVSPGERATLSCRASQSVNNNLAWYQQKPGQAPRLLIYGASTRATGIPARFSGSGSGTEFTLTISRLEPEDFAVYYCQQSNNWPITFGCGTRLEIKSGGGGSQVQLVQSGGEVKKPGASVKVSCKASGYTFTSYGISWVRQAPGQCLEWMGWISPQTGNAIYAQKLQGRVTMTRDTSTSTAYMELRSLRSDDTAVYYCARDPDYYGSGSYSDYWGQGTLVTVSSGGGGSGGGGSGGGGSEIVLTQSPATLSVSPGERATLSCRASQSVSSNLAWYQQKPGQAPRLLIYGASSRATGIPARFSGSGSGTEFTLTISSLQSEDFAVYYCQQYHSWPLLTFGCGTKVEIKSGGGGSEVQLVESGGGLVQPGGSLKLSCAASGFTFNKYAMNWVRQAPGKGLEWVARIRSKYNNYATYYADSVKDRFTISRDDSKNTAYLQMNNLKTEDTAVYYCVRHGNFGNSYISYWAYWGQGTLVTVSSGGGGSGGGGSGGGGSQTVVTQEPSLTVSPGGTVTLTCGSSTGAVTSGNYPNWVQQKPGQAPRGLIGGTKFLAPGTPARFSGSLLGGKAALTLSGVQPEDEAEYYCVLWYSNRWVFGGGTKLTVL

SEQ ID NO: 252 - protein, 751 aa, Artificial Sequence
  Synthetic
EVQLVESGGGLVQPDRSLRLSCAASGFTFRDYAMHWVRQAPGKCLEWVSGIAWNSDSIGYADSVKGRFTISRDNAKNSLFLQMHSLRPEDTALYFCAKDTLYGSGSPRAFDIWGQGTMVTVSSGGGGQGGGGQGGGGQEIVLTQSPATLSVSPGERATLSCRASQSVNNNLAWYQQKPGQAPRLLIYGASTRATGIPARFSGSGSGTEFTLTISRLEPEDFAVYYCQQSNNWPITFGCGTRLEIKSGGGGQQVQLVQSGGEVKKPGASVKVSCKASGYTFTSYGISWVRQAPGQCLEWMGWISPQTGNAIYAQKLQGRVTMTRDTSTSTAYMELRSLRSDDTAVYYCARDPDYYGSGSYSDYWGQGTLVTVSSGGGGQGGGGQGGGGQEIVLTQSPATLSVSPGERATLSCRASQSVSSNLAWYQQKPGQAPRLLIYGASSRATGIPARFSGSGSGTEFTLTISSLQSEDFAVYYCQQYHSWPLLTFGCGTKVEIKSGGGGQEVQLVESGGGLVQPGGSLKLSCAASGFTFNKYAMNWVRQAPGKGLEWVARIRSKYNNYATYYADSVKDRFTISRDDSKNTAYLQMNNLKTEDTAVYYCVRHGNFGNSYISYWAYWGQGTLVTVSSGGGGQGGGGQGGGGQQTVVTQEPSLTVSPGGTVTLTCGSSTGAVTSGNYPNWVQQKPGQAPRGLIGGTKFLAPGTPARFSGSLLGGKAALTLSGVQPEDEAEYYCVLWYSNRWVFGGGTKLTVL

SEQ ID NO: 253 - protein, 751 aa, Artificial Sequence
  Synthetic
EVQLVESGGGLVQPDRSLRLSCAASGFTFRDYAMHWVRQAPGKCLEWVSGIAWNSDSIGYADSVKGRFTISRDNAKNSLFLQMHSLRPEDTALYFCAKDTLYGSGSPRAFDIWGQGTMVTVSSGGGGSGGGGSGGGGSEIVLTQSPATLSVSPGERATLSCRASQSVNNNLAWYQQKPGQAPRLLIYGASTRATGIPARFSGSGSGTEFTLTISRLEPEDFAVYYCQQSNNWPITFGCGTRLEIKSGGGGSQVQLVQSGGEVKKPGASVKVSCKASGYTFTSYGISWVRQAPGQCLEWMGWISPQTGNAIYAQKLQGRVTMTRDTSTSTAYMELRSLRSDDTAVYYCARDPDYYGSGSYSDYWGQGTLVTVSSGGGGSGGGGSGGGGSEIVLTQSPATLSVSPGERATLSCRASQSVSSNLAWYQQKPGQAPRLLIYGASSRATGIPARFSGSGSGTEFTLTISSLQSEDFAVYYCQQYHSWPLLTFGCGTKVEIKSGGGGSEVQLVESGGGLVQPGGSLKLSCAASGFTFNKYAINWVRQAPGKGLEWVARIRSKYNNYATYYADAVKDRFTISRDDSKNTVYLQMNNLKTEDTAVYYCARAGNFGSSYISYWAYWGQGTLVTVSSGGGGSGGGGSGGGGSQTVVTQEPSLTVSPGGTVTITCGSSTGAVTSGNYPNWVQKKPGQAPRGLIGGTKFLAPGTPARFSGSLSGGKAALTLSGVQPEDEAEYYCVLWYSNRWVFGSGTKLTVL

SEQ ID NO: 254 - protein, 751 aa, Artificial Sequence
  Synthetic
EVQLVESGGGLVQPDRSLRLSCAASGFTFRDYAMHWVRQAPGKCLEWVSGIAWNSDSIGYADSVKGRFTISRDNAKNSLFLQMHSLRPEDTALYFCAKDTLYGSGSPRAFDIWGQGTMVTVSSGGGGQGGGGQGGGGQEIVLTQSPATLSVSPGERATLSCRASQSVNNNLAWYQQKPGQAPRLLIYGASTRATGIPARFSGSGSGTEFTLTISRLEPEDFAVYYCQQSNNWPITFGCGTRLEIKSGGGGQQVQLVQSGGEVKKPGASVKVSCKASGYTFTSYGISWVRQAPGQCLEWMGWISPQTGNAIYAQKLQGRVTMTRDTSTSTAYMELRSLRSDDTAVYYCARDPDYYGSGSYSDYWGQGTLVTVSSGGGGQGGGGQGGGGQEIVLTQSPATLSVSPGERATLSCRASQSVSSNLAWYQQKPGQAPRLLIYGASSRATGIPARFSGSGSGTEFTLTISSLQSEDFAVYYCQQYHSWPLLTFGCGTKVEIKSGGGGQEVQLVESGGGLVQPGGSLKLSCAASGFTFNKYAINWVRQAPGKGLEWVARIRSKYNNYATYYADAVKDRFTISRDDSKNTVYLQMNNLKTEDTAVYYCARAGNFGSSYISYWAYWGQGTLVTVSSGGGGQGGGGQGGGGQQTVVTQEPSLTVSPGGTVTITCGSSTGAVTSGNYPNWVQKKPGQAPRGLIGGTKFLAPGTPARFSGSLSGGKAALTLSGVQPEDEAEYYCVLWYSNRWVFGSGTKLTVL

SEQ ID NO: 255 - protein, 1239 aa, Artificial Sequence
  Synthetic
EVQLVESGGGLVQPDRSLRLSCAASGFTFRDYAMHWVRQAPGKCLEWVSGIAWNSDSIGYADSVKGRFTISRDNAKNSLFLQMHSLRPEDTALYFCAKDTLYGSGSPRAFDIWGQGTMVTVSSGGGGSGGGGSGGGGSEIVLTQSPATLSVSPGERATLSCRASQSVNNNLAWYQQKPGQAPRLLIYGASTRATGIPARFSGSGSGTEFTLTISRLEPEDFAVYYCQQSNNWPITFGCGTRLEIKSGGGGSQVQLVQSGGEVKKPGASVKVSCKASGYTFTSYGISWVRQAPGQCLEWMGWISPQTGNAIYAQKLQGRVTMTRDTSTSTAYMELRSLRSDDTAVYYCARDPDYYGSGSYSDYWGQGTLVTVSSGGGGSGGGGSGGGGSEIVLTQSPATLSVSPGERATLSCRASQSVSSNLAWYQQKPGQAPRLLIYGASSRATGIPARFSGSGSGTEFTLTISSLQSEDFAVYYCQQYHSWPLLTFGCGTKVEIKSGGGGSEVQLVESGGGLVQPGGSLKLSCAASGFTFNKYAMNWVRQAPGKGLEWVARIRSKYNNYATYYADSVKDRFTISRDDSKNTAYLQMNNLKTEDTAVYYCVRHGNFGNSYISYWAYWGQGTLVTVSSGGGGSGGGGSGGGGSQTVVTQEPSLTVSPGGTVTLTCGSSTGAVTSGNYPNWVQQKPGQAPRGLIGGTKFLAPGTPARFSGSLLGGKAALTLSGVQPEDEAEYYCVLWYSNRWVFGGGTKLTVLGGGGDKTHTCPPCPAPELLGGPSVFLFPPKPKDTLMISRTPEVTCVVVDVSHEDPEVKFNWYVDGVEVHNAKTKPCEEQYGSTYRCVSVLTVLHQDWLNGKEYKCKVSNKALPAPIEKTISKAKGQPREPQVYTLPPSREEMTKNQVSLTCLVKGFYPSDIAVEWESNGQPENNYKTTPPVLDSDGSFFLYSKLTVDKSRWQQGNVFSCSVMHEALHNHYTQKSLSLSPGKGGGGSGGGGSGGGGSGGGGSGGGGSGGGGSDKTHTCPPCPAPELLGGPSVFLFPPKPKDTLMISRTPEVTCVVVDVSHEDPEVKFNWYVDGVEVHNAKTKPCEEQYGSTYRCVSVLTVLHQDWLNGKEYKCKVSNKALPAPIEKTISKAKGQPREPQVYTLPPSREEMTKNQVSLTCLVKGFYPSDIAVEWESNGQPENNYKTTPPVLDSDGSFFLYSKLTVDKSRWQQGNVFSCSVMHEALHNHYTQKSLSLSPGK

SEQ ID NO: 256 - protein, 1229 aa, Artificial Sequence
  Synthetic
EVQLVESGGGLVQPDRSLRLSCAASGFTFRDYAMHWVRQAPGKCLEWVSGIAWNSDSIGYADSVKGRFTISRDNAKNSLFLQMHSLRPEDTALYFCAKDTLYGSGSPRAFDIWGQGTMVTVSSGGGGQGGGGQGGGGQEIVLTQSPATLSVSPGERATLSCRASQSVNNNLAWYQQKPGQAPRLLIYGASTRATGIPARFSGSGSGTEFTLTISRLEPEDFAVYYCQQSNNWPITFGCGTRLEIKSGGGGQQVQLVQSGGEVKKPGASVKVSCKASGYTFTSYGISWVRQAPGQCLEWMGWISPQTGNAIYAQKLQGRVTMTRDTSTSTAYMELRSLRSDDTAVYYCARDPDYYGSGSYSDYWGQGTLVTVSSGGGGQGGGGQGGGGQEIVLTQSPATLSVSPGERATLSCRASQSVSSNLAWYQQKPGQAPRLLIYGASSRATGIPARFSGSGSGTEFTLTISSLQSEDFAVYYCQQYHSWPLLTFGCGTKVEIKSGGGGQEVQLVESGGGLVQPGGSLKLSCAASGFTFNKYAMNWVRQAPGKGLEWVARIRSKYNNYATYYADSVKDRFTISRDDSKNTAYLQMNNLKTEDTAVYYCVRHGNFGNSYISYWAYWGQGTLVTVSSGGGGQGGGGQGGGGQQTVVTQEPSLTVSPGGTVTLTCGSSTGAVTSGNYPNWVQQKPGQAPRGLIGGTKFLAPGTPARFSGSLLGGKAALTLSGVQPEDEAEYYCVLWYSNRWVFGGGTKLTVLGGGGCPPCPAPELLGGPSVFLFPPKPKDTLMISRTPEVTCVVVDVSHEEPEVKFNWYVDGVEVHNAKTKPCEEQYGSTYRCVSVLTVLHQDWLNGKEYKCKVSNKALPAPIEKTISKAKGQPREPQVYTLPPSREEMTKNQVSLTCLVKGFYPSDIAVEWESNGQPENNYKTTPPVLDSDGSFFLYSKLTVDKSRWQQGNVFSCSVMHEALHNHYTQKSLSLSPGKGGGGQGGGGQGGGGQGGGGQGGGGQGGGGQCPPCPAPELLGGPSVFLFPPKPKDTLMISRTPEVTCVVVDVSHEEPEVKFNWYVDGVEVHNAKTKPCEEQYGSTYRCVSVLTVLHQDWLNGKEYKCKVSNKALPAPIEKTISKAKGQPREPQVYTLPPSREEMTKNQVSLTCLVKGFYPSDIAVEWESNGQPENNYKTTPPVLDSDGSFFLYSKLTVDKSRWQQGNVFSCSVMHEALHNHYTQKSLSLSPGK

SEQ ID NO: 257 - protein, 1239 aa, Artificial Sequence
  Synthetic
EVQLVESGGGLVQPDRSLRLSCAASGFTFRDYAMHWVRQAPGKCLEWVSGIAWNSDSIGYADSVKGRFTISRDNAKNSLFLQMHSLRPEDTALYFCAKDTLYGSGSPRAFDIWGQGTMVTVSSGGGGSGGGGSGGGGSEIVLTQSPATLSVSPGERATLSCRASQSVNNNLAWYQQKPGQAPRLLIYGASTRATGIPARFSGSGSGTEFTLTISRLEPEDFAVYYCQQSNNWPITFGCGTRLEIKSGGGGSQVQLVQSGGEVKKPGASVKVSCKASGYTFTSYGISWVRQAPGQCLEWMGWISPQTGNAIYAQKLQGRVTMTRDTSTSTAYMELRSLRSDDTAVYYCARDPDYYGSGSYSDYWGQGTLVTVSSGGGGSGGGGSGGGGSEIVLTQSPATLSVSPGERATLSCRASQSVSSNLAWYQQKPGQAPRLLIYGASSRATGIPARFSGSGSGTEFTLTISSLQSEDFAVYYCQQYHSWPLLTFGCGTKVEIKSGGGGSEVQLVESGGGLVQPGGSLKLSCAASGFTFNKYAINWVRQAPGKGLEWVARIRSKYNNYATYYADAVKDRFTISRDDSKNTVYLQMNNLKTEDTAVYYCARAGNFGSSYISYWAYWGQGTLVTVSSGGGGSGGGGSGGGGSQTVVTQEPSLTVSPGGTVTITCGSSTGAVTSGNYPNWVQKKPGQAPRGLIGGTKFLAPGTPARFSGSLSGGKAALTLSGVQPEDEAEYYCVLWYSNRWVFGSGTKLTVLGGGGDKTHTCPPCPAPELLGGPSVFLFPPKPKDTLMISRTPEVTCVVVDVSHEDPEVKFNWYVDGVEVHNAKTKPCEEQYGSTYRCVSVLTVLHQDWLNGKEYKCKVSNKALPAPIEKTISKAKGQPREPQVYTLPPSREEMTKNQVSLTCLVKGFYPSDIAVEWESNGQPENNYKTTPPVLDSDGSFFLYSKLTVDKSRWQQGNVFSCSVMHEALHNHYTQKSLSLSPGKGGGGSGGGGSGGGGSGGGGSGGGGSGGGGSDKTHTCPPCPAPELLGGPSVFLFPPKPKDTLMISRTPEVTCVVVDVSHEDPEVKFNWYVDGVEVHNAKTKPCEEQYGSTYRCVSVLTVLHQDWLNGKEYKCKVSNKALPAPIEKTISKAKGQPREPQVYTLPPSREEMTKNQVSLTCLVKGFYPSDIAVEWESNGQPENNYKTTPPVLDSDGSFFLYSKLTVDKSRWQQGNVFSCSVMHEALHNHYTQKSLSLSPGK

SEQ ID NO: 258 - protein, 1229 aa, Artificial Sequence
  Synthetic
EVQLVESGGGLVQPDRSLRLSCAASGFTFRDYAMHWVRQAPGKCLEWVSGIAWNSDSIGYADSVKGRFTISRDNAKNSLFLQMHSLRPEDTALYFCAKDTLYGSGSPRAFDIWGQGTMVTVSSGGGGQGGGGQGGGGQEIVLTQSPATLSVSPGERATLSCRASQSVNNNLAWYQQKPGQAPRLLIYGASTRATGIPARFSGSGSGTEFTLTISRLEPEDFAVYYCQQSNNWPITFGCGTRLEIKSGGGGQQVQLVQSGGEVKKPGASVKVSCKASGYTFTSYGISWVRQAPGQCLEWMGWISPQTGNAIYAQKLQGRVTMTRDTSTSTAYMELRSLRSDDTAVYYCARDPDYYGSGSYSDYWGQGTLVTVSSGGGGQGGGGQGGGGQEIVLTQSPATLSVSPGERATLSCRASQSVSSNLAWYQQKPGQAPRLLIYGASSRATGIPARFSGSGSGTEFTLTISSLQSEDFAVYYCQQYHSWPLLTFGCGTKVEIKSGGGGQEVQLVESGGGLVQPGGSLKLSCAASGFTFNKYAINWVRQAPGKGLEWVARIRSKYNNYATYYADAVKDRFTISRDDSKNTVYLQMNNLKTEDTAVYYCARAGNFGSSYISYWAYWGQGTLVTVSSGGGGQGGGGQGGGGQQTVVTQEPSLTVSPGGTVTITCGSSTGAVTSGNYPNWVQKKPGQAPRGLIGGTKFLAPGTPARFSGSLSGGKAALTLSGVQPEDEAEYYCVLWYSNRWVFGSGTKLTVLGGGGCPPCPAPELLGGPSVFLFPPKPKDTLMISRTPEVTCVVVDVSHEEPEVKFNWYVDGVEVHNAKTKPCEEQYGSTYRCVSVLTVLHQDWLNGKEYKCKVSNKALPAPIEKTISKAKGQPREPQVYTLPPSREEMTKNQVSLTCLVKGFYPSDIAVEWESNGQPENNYKTTPPVLDSDGSFFLYSKLTVDKSRWQQGNVFSCSVMHEALHNHYTQKSLSLSPGKGGGGQGGGGQGGGGQGGGGQGGGGQGGGGQCPPCPAPELLGGPSVFLFPPKPKDTLMISRTPEVTCVVVDVSHEEPEVKFNWYVDGVEVHNAKTKPCEEQYGSTYRCVSVLTVLHQDWLNGKEYKCKVSNKALPAPIEKTISKAKGQPREPQVYTLPPSREEMTKNQVSLTCLVKGFYPSDIAVEWESNGQPENNYKTTPPVLDSDGSFFLYSKLTVDKSRWQQGNVFSCSVMHEALHNHYTQKSLSLSPGK

SEQ ID NO: 259 - protein, 496 aa, Artificial Sequence
  Synthetic
EVQLVESGGGLVQPDRSLRLSCAASGFTFRDYAMHWVRQAPGKCLEWVSGIAWNSDSIGYADSVKGRFTISRDNAKNSLFLQMHSLRPEDTALYFCAKDTLYGSGSPRAFDIWGQGTMVTVSSGGGGSGGGGSGGGGSEIVLTQSPATLSVSPGERATLSCRASQSVNNNLAWYQQKPGQAPRLLIYGASTRATGIPARFSGSGSGTEFTLTISRLEPEDFAVYYCQQSNNWPITFGCGTRLEIKSGGGGSQVQLVQSGAEVKKPGASVKVSCKASGYTFTSYGISWVRQAPGQCLEWMGWISAYNGNAIYAQKLQGRVTMTRDTSTSTAYMELRSLRSDDTAVYYCARDPDYYGSGSYSDYWGQGTLVTVSSGGGGSGGGGSGGGGSEIVLTQSPATLSVSPGERATLSCRASQSVSSNLAWYQQKPGQAPRLLIYGASSRATGIPARFSGSGSGTEFTLTISSLQSEDFAVYYCQQYHSWPILHFGCGTKVEIK

SEQ ID NO: 260 - protein, 496 aa, Artificial Sequence
  Synthetic
EVQLVESGGGLVQPDRSLRLSCAASGFTFRDYAMHWVRQAPGKCLEWVSGIAWNSDSIGYADSVKGRFTISRDNAKNSLFLQMHSLRPEDTALYFCAKDTLYGSGSPRAFDIWGQGTMVTVSSGGGGQGGGGQGGGGQEIVLTQSPATLSVSPGERATLSCRASQSVNNNLAWYQQKPGQAPRLLIYGASTRATGIPARFSGSGSGTEFTLTISRLEPEDFAVYYCQQSNNWPITFGCGTRLEIKSGGGGQQVQLVQSGAEVKKPGASVKVSCKASGYTFTSYGISWVRQAPGQCLEWMGWISAYNGNAIYAQKLQGRVTMTRDTSTSTAYMELRSLRSDDTAVYYCARDPDYYGSGSYSDYWGQGTLVTVSSGGGGQGGGGQGGGGQEIVLTQSPATLSVSPGERATLSCRASQSVSSNLAWYQQKPGQAPRLLIYGASSRATGIPARFSGSGSGTEFTLTISSLQSEDFAVYYCQQYHSWPILHFGCGTKVEIK

SEQ ID NO: 261 - protein, 751 aa, Artificial Sequence
  Synthetic
EVQLVESGGGLVQPDRSLRLSCAASGFTFRDYAMHWVRQAPGKCLEWVSGIAWNSDSIGYADSVKGRFTISRDNAKNSLFLQMHSLRPEDTALYFCAKDTLYGSGSPRAFDIWGQGTMVTVSSGGGGSGGGGSGGGGSEIVLTQSPATLSVSPGERATLSCRASQSVNNNLAWYQQKPGQAPRLLIYGASTRATGIPARFSGSGSGTEFTLTISRLEPEDFAVYYCQQSNNWPITFGCGTRLEIKSGGGGSQVQLVQSGAEVKKPGASVKVSCKASGYTFTSYGISWVRQAPGQCLEWMGWISAYNGNAIYAQKLQGRVTMTRDTSTSTAYMELRSLRSDDTAVYYCARDPDYYGSGSYSDYWGQGTLVTVSSGGGGSGGGGSGGGGSEIVLTQSPATLSVSPGERATLSCRASQSVSSNLAWYQQKPGQAPRLLIYGASSRATGIPARFSGSGSGTEFTLTISSLQSEDFAVYYCQQYHSWPILHFGCGTKVEIKSGGGGSEVQLVESGGGLVQPGGSLKLSCAASGFTFNKYAMNWVRQAPGKGLEWVARIRSKYNNYATYYADSVKDRFTISRDDSKNTAYLQMNNLKTEDTAVYYCVRHGNFGNSYISYWAYWGQGTLVTVSSGGGGSGGGGSGGGGSQTVVTQEPSLTVSPGGTVTLTCGSSTGAVTSGNYPNWVQQKPGQAPRGLIGGTKFLAPGTPARFSGSLLGGKAALTLSGVQPEDEAEYYCVLWYSNRWVFGGGTKLTVL

SEQ ID NO: 262 - protein, 751 aa, Artificial Sequence
  Synthetic
EVQLVESGGGLVQPDRSLRLSCAASGFTFRDYAMHWVRQAPGKCLEWVSGIAWNSDSIGYADSVKGRFTISRDNAKNSLFLQMHSLRPEDTALYFCAKDTLYGSGSPRAFDIWGQGTMVTVSSGGGGQGGGGQGGGGQEIVLTQSPATLSVSPGERATLSCRASQSVNNNLAWYQQKPGQAPRLLIYGASTRATGIPARFSGSGSGTEFTLTISRLEPEDFAVYYCQQSNNWPITFGCGTRLEIKSGGGGQQVQLVQSGAEVKKPGASVKVSCKASGYTFTSYGISWVRQAPGQCLEWMGWISAYNGNAIYAQKLQGRVTMTRDTSTSTAYMELRSLRSDDTAVYYCARDPDYYGSGSYSDYWGQGTLVTVSSGGGGQGGGGQGGGGQEIVLTQSPATLSVSPGERATLSCRASQSVSSNLAWYQQKPGQAPRLLIYGASSRATGIPARFSGSGSGTEFTLTISSLQSEDFAVYYCQQYHSWPILHFGCGTKVEIKSGGGGQEVQLVESGGGLVQPGGSLKLSCAASGFTFNKYAMNWVRQAPGKGLEWVARIRSKYNNYATYYADSVKDRFTISRDDSKNTAYLQMNNLKTEDTAVYYCVRHGNFGNSYISYWAYWGQGTLVTVSSGGGGQGGGGQGGGGQQTVVTQEPSLTVSPGGTVTLTCGSSTGAVTSGNYPNWVQQKPGQAPRGLIGGTKFLAPGTPARFSGSLLGGKAALTLSGVQPEDEAEYYCVLWYSNRWVFGGGTKLTVL

SEQ ID NO: 263 - protein, 751 aa, Artificial Sequence
  Synthetic
EVQLVESGGGLVQPDRSLRLSCAASGFTFRDYAMHWVRQAPGKCLEWVSGIAWNSDSIGYADSVKGRFTISRDNAKNSLFLQMHSLRPEDTALYFCAKDTLYGSGSPRAFDIWGQGTMVTVSSGGGGSGGGGSGGGGSEIVLTQSPATLSVSPGERATLSCRASQSVNNNLAWYQQKPGQAPRLLIYGASTRATGIPARFSGSGSGTEFTLTISRLEPEDFAVYYCQQSNNWPITFGCGTRLEIKSGGGGSQVQLVQSGAEVKKPGASVKVSCKASGYTFTSYGISWVRQAPGQCLEWMGWISAYNGNAIYAQKLQGRVTMTRDTSTSTAYMELRSLRSDDTAVYYCARDPDYYGSGSYSDYWGQGTLVTVSSGGGGSGGGGSGGGGSEIVLTQSPATLSVSPGERATLSCRASQSVSSNLAWYQQKPGQAPRLLIYGASSRATGIPARFSGSGSGTEFTLTISSLQSEDFAVYYCQQYHSWPILHFGCGTKVEIKSGGGGSEVQLVESGGGLVQPGGSLKLSCAASGFTFNKYAINWVRQAPGKGLEWVARIRSKYNNYATYYADAVKDRFTISRDDSKNTVYLQMNNLKTEDTAVYYCARAGNFGSSYISYWAYWGQGTLVTVSSGGGGSGGGGSGGGGSQTVVTQEPSLTVSPGGTVTITCGSSTGAVTSGNYPNWVQKKPGQAPRGLIGGTKFLAPGTPARFSGSLSGGKAALTLSGVQPEDEAEYYCVLWYSNRWVFGSGTKLTVL

SEQ ID NO: 264 - protein, 751 aa, Artificial Sequence
  Synthetic
EVQLVESGGGLVQPDRSLRLSCAASGFTFRDYAMHWVRQAPGKCLEWVSGIAWNSDSIGYADSVKGRFTISRDNAKNSLFLQMHSLRPEDTALYFCAKDTLYGSGSPRAFDIWGQGTMVTVSSGGGGQGGGGQGGGGQEIVLTQSPATLSVSPGERATLSCRASQSVNNNLAWYQQKPGQAPRLLIYGASTRATGIPARFSGSGSGTEFTLTISRLEPEDFAVYYCQQSNNWPITFGCGTRLEIKSGGGGQQVQLVQSGAEVKKPGASVKVSCKASGYTFTSYGISWVRQAPGQCLEWMGWISAYNGNAIYAQKLQGRVTMTRDTSTSTAYMELRSLRSDDTAVYYCARDPDYYGSGSYSDYWGQGTLVTVSSGGGGQGGGGQGGGGQEIVLTQSPATLSVSPGERATLSCRASQSVSSNLAWYQQKPGQAPRLLIYGASSRATGIPARFSGSGSGTEFTLTISSLQSEDFAVYYCQQYHSWPILHFGCGTKVEIKSGGGGQEVQLVESGGGLVQPGGSLKLSCAASGFTFNKYAINWVRQAPGKGLEWVARIRSKYNNYATYYADAVKDRFTISRDDSKNTVYLQMNNLKTEDTAVYYCARAGNFGSSYISYWAYWGQGTLVTVSSGGGGQGGGGQGGGGQQTVVTQEPSLTVSPGGTVTITCGSSTGAVTSGNYPNWVQKKPGQAPRGLIGGTKFLAPGTPARFSGSLSGGKAALTLSGVQPEDEAEYYCVLWYSNRWVFGSGTKLTVL

SEQ ID NO: 265 - protein, 1239 aa, Artificial Sequence
  Synthetic
EVQLVESGGGLVQPDRSLRLSCAASGFTFRDYAMHWVRQAPGKCLEWVSGIAWNSDSIGYADSVKGRFTISRDNAKNSLFLQMHSLRPEDTALYFCAKDTLYGSGSPRAFDIWGQGTMVTVSSGGGGSGGGGSGGGGSEIVLTQSPATLSVSPGERATLSCRASQSVNNNLAWYQQKPGQAPRLLIYGASTRATGIPARFSGSGSGTEFTLTISRLEPEDFAVYYCQQSNNWPITFGCGTRLEIKSGGGGSQVQLVQSGAEVKKPGASVKVSCKASGYTFTSYGISWVRQAPGQCLEWMGWISAYNGNAIYAQKLQGRVTMTRDTSTSTAYMELRSLRSDDTAVYYCARDPDYYGSGSYSDYWGQGTLVTVSSGGGGSGGGGSGGGGSEIVLTQSPATLSVSPGERATLSCRASQSVSSNLAWYQQKPGQAPRLLIYGASSRATGIPARFSGSGSGTEFTLTISSLQSEDFAVYYCQQYHSWPILHFGCGTKVEIKSGGGGSEVQLVESGGGLVQPGGSLKLSCAASGFTFNKYAMNWVRQAPGKGLEWVARIRSKYNNYATYYADSVKDRFTISRDDSKNTAYLQMNNLKTEDTAVYYCVRHGNFGNSYISYWAYWGQGTLVTVSSGGGGSGGGGSGGGGSQTVVTQEPSLTVSPGGTVTLTCGSSTGAVTSGNYPNWVQQKPGQAPRGLIGGTKFLAPGTPARFSGSLLGGKAALTLSGVQPEDEAEYYCVLWYSNRWVFGGGTKLTVLGGGGDKTHTCPPCPAPELLGGPSVFLFPPKPKDTLMISRTPEVTCVVVDVSHEDPEVKFNWYVDGVEVHNAKTKPCEEQYGSTYRCVSVLTVLHQDWLNGKEYKCKVSNKALPAPIEKTISKAKGQPREPQVYTLPPSREEMTKNQVSLTCLVKGFYPSDIAVEWESNGQPENNYKTTPPVLDSDGSFFLYSKLTVDKSRWQQGNVFSCSVMHEALHNHYTQKSLSLSPGKGGGGSGGGGSGGGGSGGGGSGGGGSGGGGSDKTHTCPPCPAPELLGGPSVFLFPPKPKDTLMISRTPEVTCVVVDVSHEDPEVKFNWYVDGVEVHNAKTKPCEEQYGSTYRCVSVLTVLHQDWLNGKEYKCKVSNKALPAPIEKTISKAKGQPREPQVYTLPPSREEMTKNQVSLTCLVKGFYPSDIAVEWESNGQPENNYKTTPPVLDSDGSFFLYSKLTVDKSRWQQGNVFSCSVMHEALHNHYTQKSLSLSPGK

SEQ ID NO: 266 - protein, 1229 aa, Artificial Sequence
  Synthetic
EVQLVESGGGLVQPDRSLRLSCAASGFTFRDYAMHWVRQAPGKCLEWVSGIAWNSDSIGYADSVKGRFTISRDNAKNSLFLQMHSLRPEDTALYFCAKDTLYGSGSPRAFDIWGQGTMVTVSSGGGGQGGGGQGGGGQEIVLTQSPATLSVSPGERATLSCRASQSVNNNLAWYQQKPGQAPRLLIYGASTRATGIPARFSGSGSGTEFTLTISRLEPEDFAVYYCQQSNNWPITFGCGTRLEIKSGGGGQQVQLVQSGAEVKKPGASVKVSCKASGYTFTSYGISWVRQAPGQCLEWMGWISAYNGNAIYAQKLQGRVTMTRDTSTSTAYMELRSLRSDDTAVYYCARDPDYYGSGSYSDYWGQGTLVTVSSGGGGQGGGGQGGGGQEIVLTQSPATLSVSPGERATLSCRASQSVSSNLAWYQQKPGQAPRLLIYGASSRATGIPARFSGSGSGTEFTLTISSLQSEDFAVYYCQQYHSWPILHFGCGTKVEIKSGGGGQEVQLVESGGGLVQPGGSLKLSCAASGFTFNKYAMNWVRQAPGKGLEWVARIRSKYNNYATYYADSVKDRFTISRDDSKNTAYLQMNNLKTEDTAVYYCVRHGNFGNSYISYWAYWGQGTLVTVSSGGGGQGGGGQGGGGQQTVVTQEPSLTVSPGGTVTLTCGSSTGAVTSGNYPNWVQQKPGQAPRGLIGGTKFLAPGTPARFSGSLLGGKAALTLSGVQPEDEAEYYCVLWYSNRWVFGGGTKLTVLGGGGCPPCPAPELLGGPSVFLFPPKPKDTLMISRTPEVTCVVVDVSHEEPEVKFNWYVDGVEVHNAKTKPCEEQYGSTYRCVSVLTVLHQDWLNGKEYKCKVSNKALPAPIEKTISKAKGQPREPQVYTLPPSREEMTKNQVSLTCLVKGFYPSDIAVEWESNGQPENNYKTTPPVLDSDGSFFLYSKLTVDKSRWQQGNVFSCSVMHEALHNHYTQKSLSLSPGKGGGGQGGGGQGGGGQGGGGQGGGGQGGGGQCPPCPAPELLGGPSVFLFPPKPKDTLMISRTPEVTCVVVDVSHEEPEVKFNWYVDGVEVHNAKTKPCEEQYGSTYRCVSVLTVLHQDWLNGKEYKCKVSNKALPAPIEKTISKAKGQPREPQVYTLPPSREEMTKNQVSLTCLVKGFYPSDIAVEWESNGQPENNYKTTPPVLDSDGSFFLYSKLTVDKSRWQQGNVFSCSVMHEALHNHYTQKSLSLSPGK

SEQ ID NO: 267 - protein, 1239 aa, Artificial Sequence
  Synthetic
EVQLVESGGGLVQPDRSLRLSCAASGFTFRDYAMHWVRQAPGKCLEWVSGIAWNSDSIGYADSVKGRFTISRDNAKNSLFLQMHSLRPEDTALYFCAKDTLYGSGSPRAFDIWGQGTMVTVSSGGGGSGGGGSGGGGSEIVLTQSPATLSVSPGERATLSCRASQSVNNNLAWYQQKPGQAPRLLIYGASTRATGIPARFSGSGSGTEFTLTISRLEPEDFAVYYCQQSNNWPITFGCGTRLEIKSGGGGSQVQLVQSGAEVKKPGASVKVSCKASGYTFTSYGISWVRQAPGQCLEWMGWISAYNGNAIYAQKLQGRVTMTRDTSTSTAYMELRSLRSDDTAVYYCARDPDYYGSGSYSDYWGQGTLVTVSSGGGGSGGGGSGGGGSEIVLTQSPATLSVSPGERATLSCRASQSVSSNLAWYQQKPGQAPRLLIYGASSRATGIPARFSGSGSGTEFTLTISSLQSEDFAVYYCQQYHSWPILHFGCGTKVEIKSGGGGSEVQLVESGGGLVQPGGSLKLSCAASGFTFNKYAINWVRQAPGKGLEWVARIRSKYNNYATYYADAVKDRFTISRDDSKNTVYLQMNNLKTEDTAVYYCARAGNFGSSYISYWAYWGQGTLVTVSSGGGGSGGGGSGGGGSQTVVTQEPSLTVSPGGTVTITCGSSTGAVTSGNYPNWVQKKPGQAPRGLIGGTKFLAPGTPARFSGSLSGGKAALTLSGVQPEDEAEYYCVLWYSNRWVFGSGTKLTVLGGGGDKTHTCPPCPAPELLGGPSVFLFPPKPKDTLMISRTPEVTCVVVDVSHEDPEVKFNWYVDGVEVHNAKTKPCEEQYGSTYRCVSVLTVLHQDWLNGKEYKCKVSNKALPAPIEKTISKAKGQPREPQVYTLPPSREEMTKNQVSLTCLVKGFYPSDIAVEWESNGQPENNYKTTPPVLDSDGSFFLYSKLTVDKSRWQQGNVFSCSVMHEALHNHYTQKSLSLSPGKGGGGSGGGGSGGGGSGGGGSGGGGSGGGGSDKTHTCPPCPAPELLGGPSVFLFPPKPKDTLMISRTPEVTCVVVDVSHEDPEVKFNWYVDGVEVHNAKTKPCEEQYGSTYRCVSVLTVLHQDWLNGKEYKCKVSNKALPAPIEKTISKAKGQPREPQVYTLPPSREEMTKNQVSLTCLVKGFYPSDIAVEWESNGQPENNYKTTPPVLDSDGSFFLYSKLTVDKSRWQQGNVFSCSVMHEALHNHYTQKSLSLSPGK

SEQ ID NO: 268 - protein, 1229 aa, Artificial Sequence
  Synthetic
EVQLVESGGGLVQPDRSLRLSCAASGFTFRDYAMHWVRQAPGKCLEWVSGIAWNSDSIGYADSVKGRFTISRDNAKNSLFLQMHSLRPEDTALYFCAKDTLYGSGSPRAFDIWGQGTMVTVSSGGGGQGGGGQGGGGQEIVLTQSPATLSVSPGERATLSCRASQSVNNNLAWYQQKPGQAPRLLIYGASTRATGIPARFSGSGSGTEFTLTISRLEPEDFAVYYCQQSNNWPITFGCGTRLEIKSGGGGQQVQLVQSGAEVKKPGASVKVSCKASGYTFTSYGISWVRQAPGQCLEWMGWISAYNGNAIYAQKLQGRVTMTRDTSTSTAYMELRSLRSDDTAVYYCARDPDYYGSGSYSDYWGQGTLVTVSSGGGGQGGGGQGGGGQEIVLTQSPATLSVSPGERATLSCRASQSVSSNLAWYQQKPGQAPRLLIYGASSRATGIPARFSGSGSGTEFTLTISSLQSEDFAVYYCQQYHSWPILHFGCGTKVEIKSGGGGQEVQLVESGGGLVQPGGSLKLSCAASGFTFNKYAINWVRQAPGKGLEWVARIRSKYNNYATYYADAVKDRFTISRDDSKNTVYLQMNNLKTEDTAVYYCARAGNFGSSYISYWAYWGQGTLVTVSSGGGGQGGGGQGGGGQQTVVTQEPSLTVSPGGTVTITCGSSTGAVTSGNYPNWVQKKPGQAPRGLIGGTKFLAPGTPARFSGSLSGGKAALTLSGVQPEDEAEYYCVLWYSNRWVFGSGTKLTVLGGGGCPPCPAPELLGGPSVFLFPPKPKDTLMISRTPEVTCVVVDVSHEEPEVKFNWYVDGVEVHNAKTKPCEEQYGSTYRCVSVLTVLHQDWLNGKEYKCKVSNKALPAPIEKTISKAKGQPREPQVYTLPPSREEMTKNQVSLTCLVKGFYPSDIAVEWESNGQPENNYKTTPPVLDSDGSFFLYSKLTVDKSRWQQGNVFSCSVMHEALHNHYTQKSLSLSPGKGGGGQGGGGQGGGGQGGGGQGGGGQGGGGQCPPCPAPELLGGPSVFLFPPKPKDTLMISRTPEVTCVVVDVSHEEPEVKFNWYVDGVEVHNAKTKPCEEQYGSTYRCVSVLTVLHQDWLNGKEYKCKVSNKALPAPIEKTISKAKGQPREPQVYTLPPSREEMTKNQVSLTCLVKGFYPSDIAVEWESNGQPENNYKTTPPVLDSDGSFFLYSKLTVDKSRWQQGNVFSCSVMHEALHNHYTQKSLSLSPGK

SEQ ID NO: 269 - protein, 490 aa, Artificial Sequence
  Synthetic
EVQLVESGGGLVQPDRSLRLSCAASGFTFRDYAMHWVRQAPGKCLEWVSGIAWNSDSIGYADSVKGRFTISRDNAKNSLFLQMHSLRPEDTALYFCAKDTLYGSGSPRAFDIWGQGTMVTVSSGGGGSGGGGSGGGGSEIVLTQSPATLSVSPGERATLSCRASQSVNNNLAWYQQKPGQAPRLLIYGASTRATGIPARFSGSGSGTEFTLTISRLEPEDFAVYYCQQSNNWPITFGCGTRLEIKSGGGGSQVQLVQSGAEVKKPGASVKVSCKASGYSFTSYGITWVRQAPGQCLEWMGWISAYNGNTIYAQKLQGRVTMTTDTSTSTAYMELRSLRSDDTAVYYCVRDSNHEDFWGQGTLVTVSSGGGGSGGGGSGGGGSEIVLTQSPATLSVSPGERATLSCRASQSVSSNLAWYQQKPGQAPRLLIYGASTRATGIPARFSGSGSGTEFTLTISSLQSEDFAVYYCQQYHTWPPVTFGCGTKVEIK

SEQ ID NO: 270 - protein, 490 aa, Artificial Sequence
  Synthetic
EVQLVESGGGLVQPDRSLRLSCAASGFTFRDYAMHWVRQAPGKCLEWVSGIAWNSDSIGYADSVKGRFTISRDNAKNSLFLQMHSLRPEDTALYFCAKDTLYGSGSPRAFDIWGQGTMVTVSSGGGGQGGGGQGGGGQEIVLTQSPATLSVSPGERATLSCRASQSVNNNLAWYQQKPGQAPRLLIYGASTRATGIPARFSGSGSGTEFTLTISRLEPEDFAVYYCQQSNNWPITFGCGTRLEIKSGGGGQQVQLVQSGAEVKKPGASVKVSCKASGYSFTSYGITWVRQAPGQCLEWMGWISAYNGNTIYAQKLQGRVTMTTDTSTSTAYMELRSLRSDDTAVYYCVRDSNHEDFWGQGTLVTVSSGGGGQGGGGQGGGGQEIVLTQSPATLSVSPGERATLSCRASQSVSSNLAWYQQKPGQAPRLLIYGASTRATGIPARFSGSGSGTEFTLTISSLQSEDFAVYYCQQYHTWPPVTFGCGTKVEIK

SEQ ID NO: 271 - protein, 745 aa, Artificial Sequence
  Synthetic
EVQLVESGGGLVQPDRSLRLSCAASGFTFRDYAMHWVRQAPGKCLEWVSGIAWNSDSIGYADSVKGRFTISRDNAKNSLFLQMHSLRPEDTALYFCAKDTLYGSGSPRAFDIWGQGTMVTVSSGGGGSGGGGSGGGGSEIVLTQSPATLSVSPGERATLSCRASQSVNNNLAWYQQKPGQAPRLLIYGASTRATGIPARFSGSGSGTEFTLTISRLEPEDFAVYYCQQSNNWPITFGCGTRLEIKSGGGGSQVQLVQSGAEVKKPGASVKVSCKASGYSFTSYGITWVRQAPGQCLEWMGWISAYNGNTIYAQKLQGRVTMTTDTSTSTAYMELRSLRSDDTAVYYCVRDSNHEDFWGQGTLVTVSSGGGGSGGGGSGGGGSEIVLTQSPATLSVSPGERATLSCRASQSVSSNLAWYQQKPGQAPRLLIYGASTRATGIPARFSGSGSGTEFTLTISSLQSEDFAVYYCQQYHTWPPVTFGCGTKVEIKSGGGGSEVQLVESGGGLVQPGGSLKLSCAASGFTFNKYAMNWVRQAPGKGLEWVARIRSKYNNYATYYADSVKDRFTISRDDSKNTAYLQMNNLKTEDTAVYYCVRHGNFGNSYISYWAYWGQGTLVTVSSGGGGSGGGGSGGGGSQTVVTQEPSLTVSPGGTVTLTCGSSTGAVTSGNYPNWVQQKPGQAPRGLIGGTKFLAPGTPARFSGSLLGGKAALTLSGVQPEDEAEYYCVLWYSNRWVFGGGTKLTVL

SEQ ID NO: 272 - protein, 745 aa, Artificial Sequence
  Synthetic
EVQLVESGGGLVQPDRSLRLSCAASGFTFRDYAMHWVRQAPGKCLEWVSGIAWNSDSIGYADSVKGRFTISRDNAKNSLFLQMHSLRPEDTALYFCAKDTLYGSGSPRAFDIWGQGTMVTVSSGGGGQGGGGQGGGGQEIVLTQSPATLSVSPGERATLSCRASQSVNNNLAWYQQKPGQAPRLLIYGASTRATGIPARFSGSGSGTEFTLTISRLEPEDFAVYYCQQSNNWPITFGCGTRLEIKSGGGGQQVQLVQSGAEVKKPGASVKVSCKASGYSFTSYGITWVRQAPGQCLEWMGWISAYNGNTIYAQKLQGRVTMTTDTSTSTAYMELRSLRSDDTAVYYCVRDSNHEDFWGQGTLVTVSSGGGGQGGGGQGGGGQEIVLTQSPATLSVSPGERATLSCRASQSVSSNLAWYQQKPGQAPRLLIYGASTRATGIPARFSGSGSGTEFTLTISSLQSEDFAVYYCQQYHTWPPVTFGCGTKVEIKSGGGGQEVQLVESGGGLVQPGGSLKLSCAASGFTFNKYAMNWVRQAPGKGLEWVARIRSKYNNYATYYADSVKDRFTISRDDSKNTAYLQMNNLKTEDTAVYYCVRHGNFGNSYISYWAYWGQGTLVTVSSGGGGQGGGGQGGGGQQTVVTQEPSLTVSPGGTVTLTCGSSTGAVTSGNYPNWVQQKPGQAPRGLIGGTKFLAPGTPARFSGSLLGGKAALTLSGVQPEDEAEYYCVLWYSNRWVFGGGTKLTVL

SEQ ID NO: 273 - protein, 745 aa, Artificial Sequence
  Synthetic
EVQLVESGGGLVQPDRSLRLSCAASGFTFRDYAMHWVRQAPGKCLEWVSGIAWNSDSIGYADSVKGRFTISRDNAKNSLFLQMHSLRPEDTALYFCAKDTLYGSGSPRAFDIWGQGTMVTVSSGGGGSGGGGSGGGGSEIVLTQSPATLSVSPGERATLSCRASQSVNNNLAWYQQKPGQAPRLLIYGASTRATGIPARFSGSGSGTEFTLTISRLEPEDFAVYYCQQSNNWPITFGCGTRLEIKSGGGGSQVQLVQSGAEVKKPGASVKVSCKASGYSFTSYGITWVRQAPGQCLEWMGWISAYNGNTIYAQKLQGRVTMTTDTSTSTAYMELRSLRSDDTAVYYCVRDSNHEDFWGQGTLVTVSSGGGGSGGGGSGGGGSEIVLTQSPATLSVSPGERATLSCRASQSVSSNLAWYQQKPGQAPRLLIYGASTRATGIPARFSGSGSGTEFTLTISSLQSEDFAVYYCQQYHTWPPVTFGCGTKVEIKSGGGGSEVQLVESGGGLVQPGGSLKLSCAASGFTFNKYAINWVRQAPGKGLEWVARIRSKYNNYATYYADAVKDRFTISRDDSKNTVYLQMNNLKTEDTAVYYCARAGNFGSSYISYWAYWGQGTLVTVSSGGGGSGGGGSGGGGSQTVVTQEPSLTVSPGGTVTITCGSSTGAVTSGNYPNWVQKKPGQAPRGLIGGTKFLAPGTPARFSGSLSGGKAALTLSGVQPEDEAEYYCVLWYSNRWVFGSGTKLTVL

SEQ ID NO: 274 - protein, 745 aa, Artificial Sequence
  Synthetic
EVQLVESGGGLVQPDRSLRLSCAASGFTFRDYAMHWVRQAPGKCLEWVSGIAWNSDSIGYADSVKGRFTISRDNAKNSLFLQMHSLRPEDTALYFCAKDTLYGSGSPRAFDIWGQGTMVTVSSGGGGQGGGGQGGGGQEIVLTQSPATLSVSPGERATLSCRASQSVNNNLAWYQQKPGQAPRLLIYGASTRATGIPARFSGSGSGTEFTLTISRLEPEDFAVYYCQQSNNWPITFGCGTRLEIKSGGGGQQVQLVQSGAEVKKPGASVKVSCKASGYSFTSYGITWVRQAPGQCLEWMGWISAYNGNTIYAQKLQGRVTMTTDTSTSTAYMELRSLRSDDTAVYYCVRDSNHEDFWGQGTLVTVSSGGGGQGGGGQGGGGQEIVLTQSPATLSVSPGERATLSCRASQSVSSNLAWYQQKPGQAPRLLIYGASTRATGIPARFSGSGSGTEFTLTISSLQSEDFAVYYCQQYHTWPPVTFGCGTKVEIKSGGGGQEVQLVESGGGLVQPGGSLKLSCAASGFTFNKYAINWVRQAPGKGLEWVARIRSKYNNYATYYADAVKDRFTISRDDSKNTVYLQMNNLKTEDTAVYYCARAGNFGSSYISYWAYWGQGTLVTVSSGGGGQGGGGQGGGGQQTVVTQEPSLTVSPGGTVTITCGSSTGAVTSGNYPNWVQKKPGQAPRGLIGGTKFLAPGTPARFSGSLSGGKAALTLSGVQPEDEAEYYCVLWYSNRWVFGSGTKLTVL

SEQ ID NO: 275 - protein, 1233 aa, Artificial Sequence
  Synthetic
EVQLVESGGGLVQPDRSLRLSCAASGFTFRDYAMHWVRQAPGKCLEWVSGIAWNSDSIGYADSVKGRFTISRDNAKNSLFLQMHSLRPEDTALYFCAKDTLYGSGSPRAFDIWGQGTMVTVSSGGGGSGGGGSGGGGSEIVLTQSPATLSVSPGERATLSCRASQSVNNNLAWYQQKPGQAPRLLIYGASTRATGIPARFSGSGSGTEFTLTISRLEPEDFAVYYCQQSNNWPITFGCGTRLEIKSGGGGSQVQLVQSGAEVKKPGASVKVSCKASGYSFTSYGITWVRQAPGQCLEWMGWISAYNGNTIYAQKLQGRVTMTTDTSTSTAYMELRSLRSDDTAVYYCVRDSNHEDFWGQGTLVTVSSGGGGSGGGGSGGGGSEIVLTQSPATLSVSPGERATLSCRASQSVSSNLAWYQQKPGQAPRLLIYGASTRATGIPARFSGSGSGTEFTLTISSLQSEDFAVYYCQQYHTWPPVTFGCGTKVEIKSGGGGSEVQLVESGGGLVQPGGSLKLSCAASGFTFNKYAMNWVRQAPGKGLEWVARIRSKYNNYATYYADSVKDRFTISRDDSKNTAYLQMNNLKTEDTAVYYCVRHGNFGNSYISYWAYWGQGTLVTVSSGGGGSGGGGSGGGGSQTVVTQEPSLTVSPGGTVTLTCGSSTGAVTSGNYPNWVQQKPGQAPRGLIGGTKFLAPGTPARFSGSLLGGKAALTLSGVQPEDEAEYYCVLWYSNRWVFGGGTKLTVLGGGGDKTHTCPPCPAPELLGGPSVFLFPPKPKDTLMISRTPEVTCVVVDVSHEDPEVKFNWYVDGVEVHNAKTKPCEEQYGSTYRCVSVLTVLHQDWLNGKEYKCKVSNKALPAPIEKTISKAKGQPREPQVYTLPPSREEMTKNQVSLTCLVKGFYPSDIAVEWESNGQPENNYKTTPPVLDSDGSFFLYSKLTVDKSRWQQGNVFSCSVMHEALHNHYTQKSLSLSPGKGGGGSGGGGSGGGGSGGGGSGGGGSGGGGSDKTHTCPPCPAPELLGGPSVFLFPPKPKDTLMISRTPEVTCVVVDVSHEDPEVKFNWYVDGVEVHNAKTKPCEEQYGSTYRCVSVLTVLHQDWLNGKEYKCKVSNKALPAPIEKTISKAKGQPREPQVYTLPPSREEMTKNQVSLTCLVKGFYPSDIAVEWESNGQPENNYKTTPPVLDSDGSFFLYSKLTVDKSRWQQGNVFSCSVMHEALHNHYTQKSLSLSPGK

SEQ ID NO: 276 - protein, 1223 aa, Artificial Sequence
  Synthetic
EVQLVESGGGLVQPDRSLRLSCAASGFTFRDYAMHWVRQAPGKCLEWVSGIAWNSDSIGYADSVKGRFTISRDNAKNSLFLQMHSLRPEDTALYFCAKDTLYGSGSPRAFDIWGQGTMVTVSSGGGGQGGGGQGGGGQEIVLTQSPATLSVSPGERATLSCRASQSVNNNLAWYQQKPGQAPRLLIYGASTRATGIPARFSGSGSGTEFTLTISRLEPEDFAVYYCQQSNNWPITFGCGTRLEIKSGGGGQQVQLVQSGAEVKKPGASVKVSCKASGYSFTSYGITWVRQAPGQCLEWMGWISAYNGNTIYAQKLQGRVTMTTDTSTSTAYMELRSLRSDDTAVYYCVRDSNHEDFWGQGTLVTVSSGGGGQGGGGQGGGGQEIVLTQSPATLSVSPGERATLSCRASQSVSSNLAWYQQKPGQAPRLLIYGASTRATGIPARFSGSGSGTEFTLTISSLQSEDFAVYYCQQYHTWPPVTFGCGTKVEIKSGGGGQEVQLVESGGGLVQPGGSLKLSCAASGFTFNKYAMNWVRQAPGKGLEWVARIRSKYNNYATYYADSVKDRFTISRDDSKNTAYLQMNNLKTEDTAVYYCVRHGNFGNSYISYWAYWGQGTLVTVSSGGGGQGGGGQGGGGQQTVVTQEPSLTVSPGGTVTLTCGSSTGAVTSGNYPNWVQQKPGQAPRGLIGGTKFLAPGTPARFSGSLLGGKAALTLSGVQPEDEAEYYCVLWYSNRWVFGGGTKLTVLGGGGCPPCPAPELLGGPSVFLFPPKPKDTLMISRTPEVTCVVVDVSHEEPEVKFNWYVDGVEVHNAKTKPCEEQYGSTYRCVSVLTVLHQDWLNGKEYKCKVSNKALPAPIEKTISKAKGQPREPQVYTLPPSREEMTKNQVSLTCLVKGFYPSDIAVEWESNGQPENNYKTTPPVLDSDGSFFLYSKLTVDKSRWQQGNVFSCSVMHEALHNHYTQKSLSLSPGKGGGGQGGGGQGGGGQGGGGQGGGGQGGGGQCPPCPAPELLGGPSVFLFPPKPKDTLMISRTPEVTCVVVDVSHEEPEVKFNWYVDGVEVHNAKTKPCEEQYGSTYRCVSVLTVLHQDWLNGKEYKCKVSNKALPAPIEKTISKAKGQPREPQVYTLPPSREEMTKNQVSLTCLVKGFYPSDIAVEWESNGQPENNYKTTPPVLDSDGSFFLYSKLTVDKSRWQQGNVFSCSVMHEALHNHYTQKSLSLSPGK

SEQ ID NO: 277 - protein, 1233 aa, Artificial Sequence
  Synthetic
EVQLVESGGGLVQPDRSLRLSCAASGFTFRDYAMHWVRQAPGKCLEWVSGIAWNSDSIGYADSVKGRFTISRDNAKNSLFLQMHSLRPEDTALYFCAKDTLYGSGSPRAFDIWGQGTMVTVSSGGGGSGGGGSGGGGSEIVLTQSPATLSVSPGERATLSCRASQSVNNNLAWYQQKPGQAPRLLIYGASTRATGIPARFSGSGSGTEFTLTISRLEPEDFAVYYCQQSNNWPITFGCGTRLEIKSGGGGSQVQLVQSGAEVKKPGASVKVSCKASGYSFTSYGITWVRQAPGQCLEWMGWISAYNGNTIYAQKLQGRVTMTTDTSTSTAYMELRSLRSDDTAVYYCVRDSNHEDFWGQGTLVTVSSGGGGSGGGGSGGGGSEIVLTQSPATLSVSPGERATLSCRASQSVSSNLAWYQQKPGQAPRLLIYGASTRATGIPARFSGSGSGTEFTLTISSLQSEDFAVYYCQQYHTWPPVTFGCGTKVEIKSGGGGSEVQLVESGGGLVQPGGSLKLSCAASGFTFNKYAINWVRQAPGKGLEWVARIRSKYNNYATYYADAVKDRFTISRDDSKNTVYLQMNNLKTEDTAVYYCARAGNFGSSYISYWAYWGQGTLVTVSSGGGGSGGGGSGGGGSQTVVTQEPSLTVSPGGTVTITCGSSTGAVTSGNYPNWVQKKPGQAPRGLIGGTKFLAPGTPARFSGSLSGGKAALTLSGVQPEDEAEYYCVLWYSNRWVFGSGTKLTVLGGGGDKTHTCPPCPAPELLGGPSVFLFPPKPKDTLMISRTPEVTCVVVDVSHEDPEVKFNWYVDGVEVHNAKTKPCEEQYGSTYRCVSVLTVLHQDWLNGKEYKCKVSNKALPAPIEKTISKAKGQPREPQVYTLPPSREEMTKNQVSLTCLVKGFYPSDIAVEWESNGQPENNYKTTPPVLDSDGSFFLYSKLTVDKSRWQQGNVFSCSVMHEALHNHYTQKSLSLSPGKGGGGSGGGGSGGGGSGGGGSGGGGSGGGGSDKTHTCPPCPAPELLGGPSVFLFPPKPKDTLMISRTPEVTCVVVDVSHEDPEVKFNWYVDGVEVHNAKTKPCEEQYGSTYRCVSVLTVLHQDWLNGKEYKCKVSNKALPAPIEKTISKAKGQPREPQVYTLPPSREEMTKNQVSLTCLVKGFYPSDIAVEWESNGQPENNYKTTPPVLDSDGSFFLYSKLTVDKSRWQQGNVFSCSVMHEALHNHYTQKSLSLSPGK

SEQ ID NO: 278 - protein, 1223 aa, Artificial Sequence
  Synthetic
EVQLVESGGGLVQPDRSLRLSCAASGFTFRDYAMHWVRQAPGKCLEWVSGIAWNSDSIGYADSVKGRFTISRDNAKNSLFLQMHSLRPEDTALYFCAKDTLYGSGSPRAFDIWGQGTMVTVSSGGGGQGGGGQGGGGQEIVLTQSPATLSVSPGERATLSCRASQSVNNNLAWYQQKPGQAPRLLIYGASTRATGIPARFSGSGSGTEFTLTISRLEPEDFAVYYCQQSNNWPITFGCGTRLEIKSGGGGQQVQLVQSGAEVKKPGASVKVSCKASGYSFTSYGITWVRQAPGQCLEWMGWISAYNGNTIYAQKLQGRVTMTTDTSTSTAYMELRSLRSDDTAVYYCVRDSNHEDFWGQGTLVTVSSGGGGQGGGGQGGGGQEIVLTQSPATLSVSPGERATLSCRASQSVSSNLAWYQQKPGQAPRLLIYGASTRATGIPARFSGSGSGTEFTLTISSLQSEDFAVYYCQQYHTWPPVTFGCGTKVEIKSGGGGQEVQLVESGGGLVQPGGSLKLSCAASGFTFNKYAINWVRQAPGKGLEWVARIRSKYNNYATYYADAVKDRFTISRDDSKNTVYLQMNNLKTEDTAVYYCARAGNFGSSYISYWAYWGQGTLVTVSSGGGGQGGGGQGGGGQQTVVTQEPSLTVSPGGTVTITCGSSTGAVTSGNYPNWVQKKPGQAPRGLIGGTKFLAPGTPARFSGSLSGGKAALTLSGVQPEDEAEYYCVLWYSNRWVFGSGTKLTVLGGGGCPPCPAPELLGGPSVFLFPPKPKDTLMISRTPEVTCVVVDVSHEEPEVKFNWYVDGVEVHNAKTKPCEEQYGSTYRCVSVLTVLHQDWLNGKEYKCKVSNKALPAPIEKTISKAKGQPREPQVYTLPPSREEMTKNQVSLTCLVKGFYPSDIAVEWESNGQPENNYKTTPPVLDSDGSFFLYSKLTVDKSRWQQGNVFSCSVMHEALHNHYTQKSLSLSPGKGGGGQGGGGQGGGGQGGGGQGGGGQGGGGQCPPCPAPELLGGPSVFLFPPKPKDTLMISRTPEVTCVVVDVSHEEPEVKFNWYVDGVEVHNAKTKPCEEQYGSTYRCVSVLTVLHQDWLNGKEYKCKVSNKALPAPIEKTISKAKGQPREPQVYTLPPSREEMTKNQVSLTCLVKGFYPSDIAVEWESNGQPENNYKTTPPVLDSDGSFFLYSKLTVDKSRWQQGNVFSCSVMHEALHNHYTQKSLSLSPGK

SEQ ID NO: 279 - protein, 492 aa, Artificial Sequence
  Synthetic
EVQLVESGGGLVQPDRSLRLSCAASGFTFRDYAMHWVRQAPGKCLEWVSGIAWNSDSIGYADSVKGRFTISRDNAKNSLFLQMHSLRPEDTALYFCAKDTLYGSGSPRAFDIWGQGTMVTVSSGGGGSGGGGSGGGGSEIVLTQSPATLSVSPGERATLSCRASQSVNNNLAWYQQKPGQAPRLLIYGASTRATGIPARFSGSGSGTEFTLTISRLEPEDFAVYYCQQSNNWPITFGCGTRLEIKSGGGGSQVQLVQSGAEVKKPGESLKISCKGSGYSFTSYGISWVRQAPGQCLEWMGWISAYNGNTIYAQKLQGRVTMTTDTSTSTAYMELRRLRSDDTAVYYCARDPGVTGDDYWGQGTLVTVSSGGGGSGGGGSGGGGSEIVLTQSPATLSVSPGERATLSCRASLSVSSNLAWYQQKPGQAPRLLIYGASTRATGIPARFSGSGSGTEFTLTISSLQSEDFAVYFCQQYHSWPALTFGCGTKVEIK

SEQ ID NO: 280 - protein, 492 aa, Artificial Sequence
  Synthetic
EVQLVESGGGLVQPDRSLRLSCAASGFTFRDYAMHWVRQAPGKCLEWVSGIAWNSDSIGYADSVKGRFTISRDNAKNSLFLQMHSLRPEDTALYFCAKDTLYGSGSPRAFDIWGQGTMVTVSSGGGGQGGGGQGGGGQEIVLTQSPATLSVSPGERATLSCRASQSVNNNLAWYQQKPGQAPRLLIYGASTRATGIPARFSGSGSGTEFTLTISRLEPEDFAVYYCQQSNNWPITFGCGTRLEIKSGGGGQQVQLVQSGAEVKKPGESLKISCKGSGYSFTSYGISWVRQAPGQCLEWMGWISAYNGNTIYAQKLQGRVTMTTDTSTSTAYMELRRLRSDDTAVYYCARDPGVTGDDYWGQGTLVTVSSGGGGQGGGGQGGGGQEIVLTQSPATLSVSPGERATLSCRASLSVSSNLAWYQQKPGQAPRLLIYGASTRATGIPARFSGSGSGTEFTLTISSLQSEDFAVYFCQQYHSWPALTFGCGTKVEIK

SEQ ID NO: 281 - protein, 747 aa, Artificial Sequence
  Synthetic
EVQLVESGGGLVQPDRSLRLSCAASGFTFRDYAMHWVRQAPGKCLEWVSGIAWNSDSIGYADSVKGRFTISRDNAKNSLFLQMHSLRPEDTALYFCAKDTLYGSGSPRAFDIWGQGTMVTVSSGGGGSGGGGSGGGGSEIVLTQSPATLSVSPGERATLSCRASQSVNNNLAWYQQKPGQAPRLLIYGASTRATGIPARFSGSGSGTEFTLTISRLEPEDFAVYYCQQSNNWPITFGCGTRLEIKSGGGGSQVQLVQSGAEVKKPGESLKISCKGSGYSFTSYGISWVRQAPGQCLEWMGWISAYNGNTIYAQKLQGRVTMTTDTSTSTAYMELRRLRSDDTAVYYCARDPGVTGDDYWGQGTLVTVSSGGGGSGGGGSGGGGSEIVLTQSPATLSVSPGERATLSCRASLSVSSNLAWYQQKPGQAPRLLIYGASTRATGIPARFSGSGSGTEFTLTISSLQSEDFAVYFCQQYHSWPALTFGCGTKVEIKSGGGGSEVQLVESGGGLVQPGGSLKLSCAASGFTFNKYAMNWVRQAPGKGLEWVARIRSKYNNYATYYADSVKDRFTISRDDSKNTAYLQMNNLKTEDTAVYYCVRHGNFGNSYISYWAYWGQGTLVTVSSGGGGSGGGGSGGGGSQTVVTQEPSLTVSPGGTVTLTCGSSTGAVTSGNYPNWVQQKPGQAPRGLIGGTKFLAPGTPARFSGSLLGGKAALTLSGVQPEDEAEYYCVLWYSNRWVFGGGTKLTVL

SEQ ID NO: 282 - protein, 747 aa, Artificial Sequence
  Synthetic
EVQLVESGGGLVQPDRSLRLSCAASGFTFRDYAMHWVRQAPGKCLEWVSGIAWNSDSIGYADSVKGRFTISRDNAKNSLFLQMHSLRPEDTALYFCAKDTLYGSGSPRAFDIWGQGTMVTVSSGGGGQGGGGQGGGGQEIVLTQSPATLSVSPGERATLSCRASQSVNNNLAWYQQKPGQAPRLLIYGASTRATGIPARFSGSGSGTEFTLTISRLEPEDFAVYYCQQSNNWPITFGCGTRLEIKSGGGGQQVQLVQSGAEVKKPGESLKISCKGSGYSFTSYGISWVRQAPGQCLEWMGWISAYNGNTIYAQKLQGRVTMTTDTSTSTAYMELRRLRSDDTAVYYCARDPGVTGDDYWGQGTLVTVSSGGGGQGGGGQGGGGQEIVLTQSPATLSVSPGERATLSCRASLSVSSNLAWYQQKPGQAPRLLIYGASTRATGIPARFSGSGSGTEFTLTISSLQSEDFAVYFCQQYHSWPALTFGCGTKVEIKSGGGGQEVQLVESGGGLVQPGGSLKLSCAASGFTFNKYAMNWVRQAPGKGLEWVARIRSKYNNYATYYADSVKDRFTISRDDSKNTAYLQMNNLKTEDTAVYYCVRHGNFGNSYISYWAYWGQGTLVTVSSGGGGQGGGGQGGGGQQTVVTQEPSLTVSPGGTVTLTCGSSTGAVTSGNYPNWVQQKPGQAPRGLIGGTKFLAPGTPARFSGSLLGGKAALTLSGVQPEDEAEYYCVLWYSNRWVFGGGTKLTVL

SEQ ID NO: 283 - protein, 747 aa, Artificial Sequence
  Synthetic
EVQLVESGGGLVQPDRSLRLSCAASGFTFRDYAMHWVRQAPGKCLEWVSGIAWNSDSIGYADSVKGRFTISRDNAKNSLFLQMHSLRPEDTALYFCAKDTLYGSGSPRAFDIWGQGTMVTVSSGGGGSGGGGSGGGGSEIVLTQSPATLSVSPGERATLSCRASQSVNNNLAWYQQKPGQAPRLLIYGASTRATGIPARFSGSGSGTEFTLTISRLEPEDFAVYYCQQSNNWPITFGCGTRLEIKSGGGGSQVQLVQSGAEVKKPGESLKISCKGSGYSFTSYGISWVRQAPGQCLEWMGWISAYNGNTIYAQKLQGRVTMTTDTSTSTAYMELRRLRSDDTAVYYCARDPGVTGDDYWGQGTLVTVSSGGGGSGGGGSGGGGSEIVLTQSPATLSVSPGERATLSCRASLSVSSNLAWYQQKPGQAPRLLIYGASTRATGIPARFSGSGSGTEFTLTISSLQSEDFAVYFCQQYHSWPALTFGCGTKVEIKSGGGGSEVQLVESGGGLVQPGGSLKLSCAASGFTFNKYAINWVRQAPGKGLEWVARIRSKYNNYATYYADAVKDRFTISRDDSKNTVYLQMNNLKTEDTAVYYCARAGNFGSSYISYWAYWGQGTLVTVSSGGGGSGGGGSGGGGSQTVVTQEPSLTVSPGGTVTITCGSSTGAVTSGNYPNWVQKKPGQAPRGLIGGTKFLAPGTPARFSGSLSGGKAALTLSGVQPEDEAEYYCVLWYSNRWVFGSGTKLTVL

SEQ ID NO: 284 - protein, 747 aa, Artificial Sequence
  Synthetic
EVQLVESGGGLVQPDRSLRLSCAASGFTFRDYAMHWVRQAPGKCLEWVSGIAWNSDSIGYADSVKGRFTISRDNAKNSLFLQMHSLRPEDTALYFCAKDTLYGSGSPRAFDIWGQGTMVTVSSGGGGQGGGGQGGGGQEIVLTQSPATLSVSPGERATLSCRASQSVNNNLAWYQQKPGQAPRLLIYGASTRATGIPARFSGSGSGTEFTLTISRLEPEDFAVYYCQQSNNWPITFGCGTRLEIKSGGGGQQVQLVQSGAEVKKPGESLKISCKGSGYSFTSYGISWVRQAPGQCLEWMGWISAYNGNTIYAQKLQGRVTMTTDTSTSTAYMELRRLRSDDTAVYYCARDPGVTGDDYWGQGTLVTVSSGGGGQGGGGQGGGGQEIVLTQSPATLSVSPGERATLSCRASLSVSSNLAWYQQKPGQAPRLLIYGASTRATGIPARFSGSGSGTEFTLTISSLQSEDFAVYFCQQYHSWPALTFGCGTKVEIKSGGGGQEVQLVESGGGLVQPGGSLKLSCAASGFTFNKYAINWVRQAPGKGLEWVARIRSKYNNYATYYADAVKDRFTISRDDSKNTVYLQMNNLKTEDTAVYYCARAGNFGSSYISYWAYWGQGTLVTVSSGGGGQGGGGQGGGGQQTVVTQEPSLTVSPGGTVTITCGSSTGAVTSGNYPNWVQKKPGQAPRGLIGGTKFLAPGTPARFSGSLSGGKAALTLSGVQPEDEAEYYCVLWYSNRWVFGSGTKLTVL

SEQ ID NO: 285 - protein, 1235 aa, Artificial Sequence
  Synthetic
EVQLVESGGGLVQPDRSLRLSCAASGFTFRDYAMHWVRQAPGKCLEWVSGIAWNSDSIGYADSVKGRFTISRDNAKNSLFLQMHSLRPEDTALYFCAKDTLYGSGSPRAFDIWGQGTMVTVSSGGGGSGGGGSGGGGSEIVLTQSPATLSVSPGERATLSCRASQSVNNNLAWYQQKPGQAPRLLIYGASTRATGIPARFSGSGSGTEFTLTISRLEPEDFAVYYCQQSNNWPITFGCGTRLEIKSGGGGSQVQLVQSGAEVKKPGESLKISCKGSGYSFTSYGISWVRQAPGQCLEWMGWISAYNGNTIYAQKLQGRVTMTTDTSTSTAYMELRRLRSDDTAVYYCARDPGVTGDDYWGQGTLVTVSSGGGGSGGGGSGGGGSEIVLTQSPATLSVSPGERATLSCRASLSVSSNLAWYQQKPGQAPRLLIYGASTRATGIPARFSGSGSGTEFTLTISSLQSEDFAVYFCQQYHSWPALTFGCGTKVEIKSGGGGSEVQLVESGGGLVQPGGSLKLSCAASGFTFNKYAMNWVRQAPGKGLEWVARIRSKYNNYATYYADSVKDRFTISRDDSKNTAYLQMNNLKTEDTAVYYCVRHGNFGNSYISYWAYWGQGTLVTVSSGGGGSGGGGSGGGGSQTVVTQEPSLTVSPGGTVTLTCGSSTGAVTSGNYPNWVQQKPGQAPRGLIGGTKFLAPGTPARFSGSLLGGKAALTLSGVQPEDEAEYYCVLWYSNRWVFGGGTKLTVLGGGGDKTHTCPPCPAPELLGGPSVFLFPPKPKDTLMISRTPEVTCVVVDVSHEDPEVKFNWYVDGVEVHNAKTKPCEEQYGSTYRCVSVLTVLHQDWLNGKEYKCKVSNKALPAPIEKTISKAKGQPREPQVYTLPPSREEMTKNQVSLTCLVKGFYPSDIAVEWESNGQPENNYKTTPPVLDSDGSFFLYSKLTVDKSRWQQGNVFSCSVMHEALHNHYTQKSLSLSPGKGGGGSGGGGSGGGGSGGGGSGGGGSGGGGSDKTHTCPPCPAPELLGGPSVFLFPPKPKDTLMISRTPEVTCVVVDVSHEDPEVKFNWYVDGVEVHNAKTKPCEEQYGSTYRCVSVLTVLHQDWLNGKEYKCKVSNKALPAPIEKTISKAKGQPREPQVYTLPPSREEMTKNQVSLTCLVKGFYPSDIAVEWESNGQPENNYKTTPPVLDSDGSFFLYSKLTVDKSRWQQGNVFSCSVMHEALHNHYTQKSLSLSPGK

SEQ ID NO: 286 - protein, 1225 aa, Artificial Sequence
  Synthetic
EVQLVESGGGLVQPDRSLRLSCAASGFTFRDYAMHWVRQAPGKCLEWVSGIAWNSDSIGYADSVKGRFTISRDNAKNSLFLQMHSLRPEDTALYFCAKDTLYGSGSPRAFDIWGQGTMVTVSSGGGGQGGGGQGGGGQEIVLTQSPATLSVSPGERATLSCRASQSVNNNLAWYQQKPGQAPRLLIYGASTRATGIPARFSGSGSGTEFTLTISRLEPEDFAVYYCQQSNNWPITFGCGTRLEIKSGGGGQQVQLVQSGAEVKKPGESLKISCKGSGYSFTSYGISWVRQAPGQCLEWMGWISAYNGNTIYAQKLQGRVTMTTDTSTSTAYMELRRLRSDDTAVYYCARDPGVTGDDYWGQGTLVTVSSGGGGQGGGGQGGGGQEIVLTQSPATLSVSPGERATLSCRASLSVSSNLAWYQQKPGQAPRLLIYGASTRATGIPARFSGSGSGTEFTLTISSLQSEDFAVYFCQQYHSWPALTFGCGTKVEIKSGGGGQEVQLVESGGGLVQPGGSLKLSCAASGFTFNKYAMNWVRQAPGKGLEWVARIRSKYNNYATYYADSVKDRFTISRDDSKNTAYLQMNNLKTEDTAVYYCVRHGNFGNSYISYWAYWGQGTLVTVSSGGGGQGGGGQGGGGQQTVVTQEPSLTVSPGGTVTLTCGSSTGAVTSGNYPNWVQQKPGQAPRGLIGGTKFLAPGTPARFSGSLLGGKAALTLSGVQPEDEAEYYCVLWYSNRWVFGGGTKLTVLGGGGCPPCPAPELLGGPSVFLFPPKPKDTLMISRTPEVTCVVVDVSHEEPEVKFNWYVDGVEVHNAKTKPCEEQYGSTYRCVSVLTVLHQDWLNGKEYKCKVSNKALPAPIEKTISKAKGQPREPQVYTLPPSREEMTKNQVSLTCLVKGFYPSDIAVEWESNGQPENNYKTTPPVLDSDGSFFLYSKLTVDKSRWQQGNVFSCSVMHEALHNHYTQKSLSLSPGKGGGGQGGGGQGGGGQGGGGQGGGGQGGGGQCPPCPAPELLGGPSVFLFPPKPKDTLMISRTPEVTCVVVDVSHEEPEVKFNWYVDGVEVHNAKTKPCEEQYGSTYRCVSVLTVLHQDWLNGKEYKCKVSNKALPAPIEKTISKAKGQPREPQVYTLPPSREEMTKNQVSLTCLVKGFYPSDIAVEWESNGQPENNYKTTPPVLDSDGSFFLYSKLTVDKSRWQQGNVFSCSVMHEALHNHYTQKSLSLSPGK

SEQ ID NO: 287 - protein, 1235 aa, Artificial Sequence
  Synthetic
EVQLVESGGGLVQPDRSLRLSCAASGFTFRDYAMHWVRQAPGKCLEWVSGIAWNSDSIGYADSVKGRFTISRDNAKNSLFLQMHSLRPEDTALYFCAKDTLYGSGSPRAFDIWGQGTMVTVSSGGGGSGGGGSGGGGSEIVLTQSPATLSVSPGERATLSCRASQSVNNNLAWYQQKPGQAPRLLIYGASTRATGIPARFSGSGSGTEFTLTISRLEPEDFAVYYCQQSNNWPITFGCGTRLEIKSGGGGSQVQLVQSGAEVKKPGESLKISCKGSGYSFTSYGISWVRQAPGQCLEWMGWISAYNGNTIYAQKLQGRVTMTTDTSTSTAYMELRRLRSDDTAVYYCARDPGVTGDDYWGQGTLVTVSSGGGGSGGGGSGGGGSEIVLTQSPATLSVSPGERATLSCRASLSVSSNLAWYQQKPGQAPRLLIYGASTRATGIPARFSGSGSGTEFTLTISSLQSEDFAVYFCQQYHSWPALTFGCGTKVEIKSGGGGSEVQLVESGGGLVQPGGSLKLSCAASGFTFNKYAINWVRQAPGKGLEWVARIRSKYNNYATYYADAVKDRFTISRDDSKNTVYLQMNNLKTEDTAVYYCARAGNFGSSYISYWAYWGQGTLVTVSSGGGGSGGGGSGGGGSQTVVTQEPSLTVSPGGTVTITCGSSTGAVTSGNYPNWVQKKPGQAPRGLIGGTKFLAPGTPARFSGSLSGGKAALTLSGVQPEDEAEYYCVLWYSNRWVFGSGTKLTVLGGGGDKTHTCPPCPAPELLGGPSVFLFPPKPKDTLMISRTPEVTCVVVDVSHEDPEVKFNWYVDGVEVHNAKTKPCEEQYGSTYRCVSVLTVLHQDWLNGKEYKCKVSNKALPAPIEKTISKAKGQPREPQVYTLPPSREEMTKNQVSLTCLVKGFYPSDIAVEWESNGQPENNYKTTPPVLDSDGSFFLYSKLTVDKSRWQQGNVFSCSVMHEALHNHYTQKSLSLSPGKGGGGSGGGGSGGGGSGGGGSGGGGSGGGGSDKTHTCPPCPAPELLGGPSVFLFPPKPKDTLMISRTPEVTCVVVDVSHEDPEVKFNWYVDGVEVHNAKTKPCEEQYGSTYRCVSVLTVLHQDWLNGKEYKCKVSNKALPAPIEKTISKAKGQPREPQVYTLPPSREEMTKNQVSLTCLVKGFYPSDIAVEWESNGQPENNYKTTPPVLDSDGSFFLYSKLTVDKSRWQQGNVFSCSVMHEALHNHYTQKSLSLSPGK

SEQ ID NO: 288 - protein, 1225 aa, Artificial Sequence
  Synthetic
EVQLVESGGGLVQPDRSLRLSCAASGFTFRDYAMHWVRQAPGKCLEWVSGIAWNSDSIGYADSVKGRFTISRDNAKNSLFLQMHSLRPEDTALYFCAKDTLYGSGSPRAFDIWGQGTMVTVSSGGGGQGGGGQGGGGQEIVLTQSPATLSVSPGERATLSCRASQSVNNNLAWYQQKPGQAPRLLIYGASTRATGIPARFSGSGSGTEFTLTISRLEPEDFAVYYCQQSNNWPITFGCGTRLEIKSGGGGQQVQLVQSGAEVKKPGESLKISCKGSGYSFTSYGISWVRQAPGQCLEWMGWISAYNGNTIYAQKLQGRVTMTTDTSTSTAYMELRRLRSDDTAVYYCARDPGVTGDDYWGQGTLVTVSSGGGGQGGGGQGGGGQEIVLTQSPATLSVSPGERATLSCRASLSVSSNLAWYQQKPGQAPRLLIYGASTRATGIPARFSGSGSGTEFTLTISSLQSEDFAVYFCQQYHSWPALTFGCGTKVEIKSGGGGQEVQLVESGGGLVQPGGSLKLSCAASGFTFNKYAINWVRQAPGKGLEWVARIRSKYNNYATYYADAVKDRFTISRDDSKNTVYLQMNNLKTEDTAVYYCARAGNFGSSYISYWAYWGQGTLVTVSSGGGGQGGGGQGGGGQQTVVTQEPSLTVSPGGTVTITCGSSTGAVTSGNYPNWVQKKPGQAPRGLIGGTKFLAPGTPARFSGSLSGGKAALTLSGVQPEDEAEYYCVLWYSNRWVFGSGTKLTVLGGGGCPPCPAPELLGGPSVFLFPPKPKDTLMISRTPEVTCVVVDVSHEEPEVKFNWYVDGVEVHNAKTKPCEEQYGSTYRCVSVLTVLHQDWLNGKEYKCKVSNKALPAPIEKTISKAKGQPREPQVYTLPPSREEMTKNQVSLTCLVKGFYPSDIAVEWESNGQPENNYKTTPPVLDSDGSFFLYSKLTVDKSRWQQGNVFSCSVMHEALHNHYTQKSLSLSPGKGGGGQGGGGQGGGGQGGGGQGGGGQGGGGQCPPCPAPELLGGPSVFLFPPKPKDTLMISRTPEVTCVVVDVSHEEPEVKFNWYVDGVEVHNAKTKPCEEQYGSTYRCVSVLTVLHQDWLNGKEYKCKVSNKALPAPIEKTISKAKGQPREPQVYTLPPSREEMTKNQVSLTCLVKGFYPSDIAVEWESNGQPENNYKTTPPVLDSDGSFFLYSKLTVDKSRWQQGNVFSCSVMHEALHNHYTQKSLSLSPGK

SEQ ID NO: 289 - protein, 490 aa, Artificial Sequence
  Synthetic
EVQLVESGGGLVQPDRSLRLSCAASGFTFRDYAMHWVRQAPGKCLEWVSGIAWNSDSIGYADSVKGRFTISRDNAKNSLFLQMHSLRPEDTALYFCAKDTLYGSGSPRAFDIWGQGTMVTVSSGGGGSGGGGSGGGGSEIVLTQSPATLSVSPGERATLSCRASQSVNNNLAWYQQKPGQAPRLLIYGASTRATGIPARFSGSGSGTEFTLTISRLEPEDFAVYYCQQSNNWPITFGCGTRLEIKSGGGGSQVQLVQSGAEVKKPGASVKVSCKASGYTFNNYGISWVRQAPGQCLEWMGWISAYNGKTSYAQKFQGRVTMTTDTSTGTAYMELRSLRSDDTAVYYCARSTGDGEYWGQGTLVTVSSGGGGSGGGGSGGGGSEIVMTQSPATLSVSPGERATLSCRASQSVSSNLAWYQQKPGQAPRLLIYGASTRATGIPARFSGGGSGTEFTLTISSLQSEDFAVYYCQQYHTWPVLTFGCGTKVEIK

SEQ ID NO: 290 - protein, 490 aa, Artificial Sequence
  Synthetic
EVQLVESGGGLVQPDRSLRLSCAASGFTFRDYAMHWVRQAPGKCLEWVSGIAWNSDSIGYADSVKGRFTISRDNAKNSLFLQMHSLRPEDTALYFCAKDTLYGSGSPRAFDIWGQGTMVTVSSGGGGQGGGGQGGGGQEIVLTQSPATLSVSPGERATLSCRASQSVNNNLAWYQQKPGQAPRLLIYGASTRATGIPARFSGSGSGTEFTLTISRLEPEDFAVYYCQQSNNWPITFGCGTRLEIKSGGGGQQVQLVQSGAEVKKPGASVKVSCKASGYTFNNYGISWVRQAPGQCLEWMGWISAYNGKTSYAQKFQGRVTMTTDTSTGTAYMELRSLRSDDTAVYYCARSTGDGEYWGQGTLVTVSSGGGGQGGGGQGGGGQEIVMTQSPATLSVSPGERATLSCRASQSVSSNLAWYQQKPGQAPRLLIYGASTRATGIPARFSGGGSGTEFTLTISSLQSEDFAVYYCQQYHTWPVLTFGCGTKVEIK

SEQ ID NO: 291 - protein, 745 aa, Artificial Sequence
  Synthetic
EVQLVESGGGLVQPDRSLRLSCAASGFTFRDYAMHWVRQAPGKCLEWVSGIAWNSDSIGYADSVKGRFTISRDNAKNSLFLQMHSLRPEDTALYFCAKDTLYGSGSPRAFDIWGQGTMVTVSSGGGGSGGGGSGGGGSEIVLTQSPATLSVSPGERATLSCRASQSVNNNLAWYQQKPGQAPRLLIYGASTRATGIPARFSGSGSGTEFTLTISRLEPEDFAVYYCQQSNNWPITFGCGTRLEIKSGGGGSQVQLVQSGAEVKKPGASVKVSCKASGYTFNNYGISWVRQAPGQCLEWMGWISAYNGKTSYAQKFQGRVTMTTDTSTGTAYMELRSLRSDDTAVYYCARSTGDGEYWGQGTLVTVSSGGGGSGGGGSGGGGSEIVMTQSPATLSVSPGERATLSCRASQSVSSNLAWYQQKPGQAPRLLIYGASTRATGIPARFSGGGSGTEFTLTISSLQSEDFAVYYCQQYHTWPVLTFGCGTKVEIKSGGGGSEVQLVESGGGLVQPGGSLKLSCAASGFTFNKYAMNWVRQAPGKGLEWVARIRSKYNNYATYYADSVKDRFTISRDDSKNTAYLQMNNLKTEDTAVYYCVRHGNFGNSYISYWAYWGQGTLVTVSSGGGGSGGGGSGGGGSQTVVTQEPSLTVSPGGTVTLTCGSSTGAVTSGNYPNWVQQKPGQAPRGLIGGTKFLAPGTPARFSGSLLGGKAALTLSGVQPEDEAEYYCVLWYSNRWVFGGGTKLTVL

SEQ ID NO: 292 - protein, 745 aa, Artificial Sequence
  Synthetic
EVQLVESGGGLVQPDRSLRLSCAASGFTFRDYAMHWVRQAPGKCLEWVSGIAWNSDSIGYADSVKGRFTISRDNAKNSLFLQMHSLRPEDTALYFCAKDTLYGSGSPRAFDIWGQGTMVTVSSGGGGQGGGGQGGGGQEIVLTQSPATLSVSPGERATLSCRASQSVNNNLAWYQQKPGQAPRLLIYGASTRATGIPARFSGSGSGTEFTLTISRLEPEDFAVYYCQQSNNWPITFGCGTRLEIKSGGGGQQVQLVQSGAEVKKPGASVKVSCKASGYTFNNYGISWVRQAPGQCLEWMGWISAYNGKTSYAQKFQGRVTMTTDTSTGTAYMELRSLRSDDTAVYYCARSTGDGEYWGQGTLVTVSSGGGGQGGGGQGGGGQEIVMTQSPATLSVSPGERATLSCRASQSVSSNLAWYQQKPGQAPRLLIYGASTRATGIPARFSGGGSGTEFTLTISSLQSEDFAVYYCQQYHTWPVLTFGCGTKVEIKSGGGGQEVQLVESGGGLVQPGGSLKLSCAASGFTFNKYAMNWVRQAPGKGLEWVARIRSKYNNYATYYADSVKDRFTISRDDSKNTAYLQMNNLKTEDTAVYYCVRHGNFGNSYISYWAYWGQGTLVTVSSGGGGQGGGGQGGGGQQTVVTQEPSLTVSPGGTVTLTCGSSTGAVTSGNYPNWVQQKPGQAPRGLIGGTKFLAPGTPARFSGSLLGGKAALTLSGVQPEDEAEYYCVLWYSNRWVFGGGTKLTVL

SEQ ID NO: 293 - protein, 745 aa, Artificial Sequence
  Synthetic
EVQLVESGGGLVQPDRSLRLSCAASGFTFRDYAMHWVRQAPGKCLEWVSGIAWNSDSIGYADSVKGRFTISRDNAKNSLFLQMHSLRPEDTALYFCAKDTLYGSGSPRAFDIWGQGTMVTVSSGGGGSGGGGSGGGGSEIVLTQSPATLSVSPGERATLSCRASQSVNNNLAWYQQKPGQAPRLLIYGASTRATGIPARFSGSGSGTEFTLTISRLEPEDFAVYYCQQSNNWPITFGCGTRLEIKSGGGGSQVQLVQSGAEVKKPGASVKVSCKASGYTFNNYGISWVRQAPGQCLEWMGWISAYNGKTSYAQKFQGRVTMTTDTSTGTAYMELRSLRSDDTAVYYCARSTGDGEYWGQGTLVTVSSGGGGSGGGGSGGGGSEIVMTQSPATLSVSPGERATLSCRASQSVSSNLAWYQQKPGQAPRLLIYGASTRATGIPARFSGGGSGTEFTLTISSLQSEDFAVYYCQQYHTWPVLTFGCGTKVEIKSGGGGSEVQLVESGGGLVQPGGSLKLSCAASGFTFNKYAINWVRQAPGKGLEWVARIRSKYNNYATYYADAVKDRFTISRDDSKNTVYLQMNNLKTEDTAVYYCARAGNFGSSYISYWAYWGQGTLVTVSSGGGGSGGGGSGGGGSQTVVTQEPSLTVSPGGTVTITCGSSTGAVTSGNYPNWVQKKPGQAPRGLIGGTKFLAPGTPARFSGSLSGGKAALTLSGVQPEDEAEYYCVLWYSNRWVFGSGTKLTVL

SEQ ID NO: 294 - protein, 745 aa, Artificial Sequence
  Synthetic
EVQLVESGGGLVQPDRSLRLSCAASGFTFRDYAMHWVRQAPGKCLEWVSGIAWNSDSIGYADSVKGRFTISRDNAKNSLFLQMHSLRPEDTALYFCAKDTLYGSGSPRAFDIWGQGTMVTVSSGGGGQGGGGQGGGGQEIVLTQSPATLSVSPGERATLSCRASQSVNNNLAWYQQKPGQAPRLLIYGASTRATGIPARFSGSGSGTEFTLTISRLEPEDFAVYYCQQSNNWPITFGCGTRLEIKSGGGGQQVQLVQSGAEVKKPGASVKVSCKASGYTFNNYGISWVRQAPGQCLEWMGWISAYNGKTSYAQKFQGRVTMTTDTSTGTAYMELRSLRSDDTAVYYCARSTGDGEYWGQGTLVTVSSGGGGQGGGGQGGGGQEIVMTQSPATLSVSPGERATLSCRASQSVSSNLAWYQQKPGQAPRLLIYGASTRATGIPARFSGGGSGTEFTLTISSLQSEDFAVYYCQQYHTWPVLTFGCGTKVEIKSGGGGQEVQLVESGGGLVQPGGSLKLSCAASGFTFNKYAINWVRQAPGKGLEWVARIRSKYNNYATYYADAVKDRFTISRDDSKNTVYLQMNNLKTEDTAVYYCARAGNFGSSYISYWAYWGQGTLVTVSSGGGGQGGGGQGGGGQQTVVTQEPSLTVSPGGTVTITCGSSTGAVTSGNYPNWVQKKPGQAPRGLIGGTKFLAPGTPARFSGSLSGGKAALTLSGVQPEDEAEYYCVLWYSNRWVFGSGTKLTVL

SEQ ID NO: 295 - protein, 1233 aa, Artificial Sequence
  Synthetic
EVQLVESGGGLVQPDRSLRLSCAASGFTFRDYAMHWVRQAPGKCLEWVSGIAWNSDSIGYADSVKGRFTISRDNAKNSLFLQMHSLRPEDTALYFCAKDTLYGSGSPRAFDIWGQGTMVTVSSGGGGSGGGGSGGGGSEIVLTQSPATLSVSPGERATLSCRASQSVNNNLAWYQQKPGQAPRLLIYGASTRATGIPARFSGSGSGTEFTLTISRLEPEDFAVYYCQQSNNWPITFGCGTRLEIKSGGGGSQVQLVQSGAEVKKPGASVKVSCKASGYTFNNYGISWVRQAPGQCLEWMGWISAYNGKTSYAQKFQGRVTMTTDTSTGTAYMELRSLRSDDTAVYYCARSTGDGEYWGQGTLVTVSSGGGGSGGGGSGGGGSEIVMTQSPATLSVSPGERATLSCRASQSVSSNLAWYQQKPGQAPRLLIYGASTRATGIPARFSGGGSGTEFTLTISSLQSEDFAVYYCQQYHTWPVLTFGCGTKVEIKSGGGGSEVQLVESGGGLVQPGGSLKLSCAASGFTFNKYAMNWVRQAPGKGLEWVARIRSKYNNYATYYADSVKDRFTISRDDSKNTAYLQMNNLKTEDTAVYYCVRHGNFGNSYISYWAYWGQGTLVTVSSGGGGSGGGGSGGGGSQTVVTQEPSLTVSPGGTVTLTCGSSTGAVTSGNYPNWVQQKPGQAPRGLIGGTKFLAPGTPARFSGSLLGGKAALTLSGVQPEDEAEYYCVLWYSNRWVFGGGTKLTVLGGGGDKTHTCPPCPAPELLGGPSVFLFPPKPKDTLMISRTPEVTCVVVDVSHEDPEVKFNWYVDGVEVHNAKTKPCEEQYGSTYRCVSVLTVLHQDWLNGKEYKCKVSNKALPAPIEKTISKAKGQPREPQVYTLPPSREEMTKNQVSLTCLVKGFYPSDIAVEWESNGQPENNYKTTPPVLDSDGSFFLYSKLTVDKSRWQQGNVFSCSVMHEALHNHYTQKSLSLSPGKGGGGSGGGGSGGGGSGGGGSGGGGSGGGGSDKTHTCPPCPAPELLGGPSVFLFPPKPKDTLMISRTPEVTCVVVDVSHEDPEVKFNWYVDGVEVHNAKTKPCEEQYGSTYRCVSVLTVLHQDWLNGKEYKCKVSNKALPAPIEKTISKAKGQPREPQVYTLPPSREEMTKNQVSLTCLVKGFYPSDIAVEWESNGQPENNYKTTPPVLDSDGSFFLYSKLTVDKSRWQQGNVFSCSVMHEALHNHYTQKSLSLSPGK

SEQ ID NO: 296 - protein, 1223 aa, Artificial Sequence
  Synthetic
EVQLVESGGGLVQPDRSLRLSCAASGFTFRDYAMHWVRQAPGKCLEWVSGIAWNSDSIGYADSVKGRFTISRDNAKNSLFLQMHSLRPEDTALYFCAKDTLYGSGSPRAFDIWGQGTMVTVSSGGGGQGGGGQGGGGQEIVLTQSPATLSVSPGERATLSCRASQSVNNNLAWYQQKPGQAPRLLIYGASTRATGIPARFSGSGSGTEFTLTISRLEPEDFAVYYCQQSNNWPITFGCGTRLEIKSGGGGQQVQLVQSGAEVKKPGASVKVSCKASGYTFNNYGISWVRQAPGQCLEWMGWISAYNGKTSYAQKFQGRVTMTTDTSTGTAYMELRSLRSDDTAVYYCARSTGDGEYWGQGTLVTVSSGGGGQGGGGQGGGGQEIVMTQSPATLSVSPGERATLSCRASQSVSSNLAWYQQKPGQAPRLLIYGASTRATGIPARFSGGGSGTEFTLTISSLQSEDFAVYYCQQYHTWPVLTFGCGTKVEIKSGGGGQEVQLVESGGGLVQPGGSLKLSCAASGFTFNKYAMNWVRQAPGKGLEWVARIRSKYNNYATYYADSVKDRFTISRDDSKNTAYLQMNNLKTEDTAVYYCVRHGNFGNSYISYWAYWGQGTLVTVSSGGGGQGGGGQGGGGQQTVVTQEPSLTVSPGGTVTLTCGSSTGAVTSGNYPNWVQQKPGQAPRGLIGGTKFLAPGTPARFSGSLLGGKAALTLSGVQPEDEAEYYCVLWYSNRWVFGGGTKLTVLGGGGCPPCPAPELLGGPSVFLFPPKPKDTLMISRTPEVTCVVVDVSHEEPEVKFNWYVDGVEVHNAKTKPCEEQYGSTYRCVSVLTVLHQDWLNGKEYKCKVSNKALPAPIEKTISKAKGQPREPQVYTLPPSREEMTKNQVSLTCLVKGFYPSDIAVEWESNGQPENNYKTTPPVLDSDGSFFLYSKLTVDKSRWQQGNVFSCSVMHEALHNHYTQKSLSLSPGKGGGGQGGGGQGGGGQGGGGQGGGGQGGGGQCPPCPAPELLGGPSVFLFPPKPKDTLMISRTPEVTCVVVDVSHEEPEVKFNWYVDGVEVHNAKTKPCEEQYGSTYRCVSVLTVLHQDWLNGKEYKCKVSNKALPAPIEKTISKAKGQPREPQVYTLPPSREEMTKNQVSLTCLVKGFYPSDIAVEWESNGQPENNYKTTPPVLDSDGSFFLYSKLTVDKSRWQQGNVFSCSVMHEALHNHYTQKSLSLSPGK

SEQ ID NO: 297 - protein, 1233 aa, Artificial Sequence
  Synthetic
EVQLVESGGGLVQPDRSLRLSCAASGFTFRDYAMHWVRQAPGKCLEWVSGIAWNSDSIGYADSVKGRFTISRDNAKNSLFLQMHSLRPEDTALYFCAKDTLYGSGSPRAFDIWGQGTMVTVSSGGGGSGGGGSGGGGSEIVLTQSPATLSVSPGERATLSCRASQSVNNNLAWYQQKPGQAPRLLIYGASTRATGIPARFSGSGSGTEFTLTISRLEPEDFAVYYCQQSNNWPITFGCGTRLEIKSGGGGSQVQLVQSGAEVKKPGASVKVSCKASGYTFNNYGISWVRQAPGQCLEWMGWISAYNGKTSYAQKFQGRVTMTTDTSTGTAYMELRSLRSDDTAVYYCARSTGDGEYWGQGTLVTVSSGGGGSGGGGSGGGGSEIVMTQSPATLSVSPGERATLSCRASQSVSSNLAWYQQKPGQAPRLLIYGASTRATGIPARFSGGGSGTEFTLTISSLQSEDFAVYYCQQYHTWPVLTFGCGTKVEIKSGGGGSEVQLVESGGGLVQPGGSLKLSCAASGFTFNKYAINWVRQAPGKGLEWVARIRSKYNNYATYYADAVKDRFTISRDDSKNTVYLQMNNLKTEDTAVYYCARAGNFGSSYISYWAYWGQGTLVTVSSGGGGSGGGGSGGGGSQTVVTQEPSLTVSPGGTVTITCGSSTGAVTSGNYPNWVQKKPGQAPRGLIGGTKFLAPGTPARFSGSLSGGKAALTLSGVQPEDEAEYYCVLWYSNRWVFGSGTKLTVLGGGGDKTHTCPPCPAPELLGGPSVFLFPPKPKDTLMISRTPEVTCVVVDVSHEDPEVKFNWYVDGVEVHNAKTKPCEEQYGSTYRCVSVLTVLHQDWLNGKEYKCKVSNKALPAPIEKTISKAKGQPREPQVYTLPPSREEMTKNQVSLTCLVKGFYPSDIAVEWESNGQPENNYKTTPPVLDSDGSFFLYSKLTVDKSRWQQGNVFSCSVMHEALHNHYTQKSLSLSPGKGGGGSGGGGSGGGGSGGGGSGGGGSGGGGSDKTHTCPPCPAPELLGGPSVFLFPPKPKDTLMISRTPEVTCVVVDVSHEDPEVKFNWYVDGVEVHNAKTKPCEEQYGSTYRCVSVLTVLHQDWLNGKEYKCKVSNKALPAPIEKTISKAKGQPREPQVYTLPPSREEMTKNQVSLTCLVKGFYPSDIAVEWESNGQPENNYKTTPPVLDSDGSFFLYSKLTVDKSRWQQGNVFSCSVMHEALHNHYTQKSLSLSPGK

SEQ ID NO: 298 - protein, 1223 aa, Artificial Sequence
  Synthetic
EVQLVESGGGLVQPDRSLRLSCAASGFTFRDYAMHWVRQAPGKCLEWVSGIAWNSDSIGYADSVKGRFTISRDNAKNSLFLQMHSLRPEDTALYFCAKDTLYGSGSPRAFDIWGQGTMVTVSSGGGGQGGGGQGGGGQEIVLTQSPATLSVSPGERATLSCRASQSVNNNLAWYQQKPGQAPRLLIYGASTRATGIPARFSGSGSGTEFTLTISRLEPEDFAVYYCQQSNNWPITFGCGTRLEIKSGGGGQQVQLVQSGAEVKKPGASVKVSCKASGYTFNNYGISWVRQAPGQCLEWMGWISAYNGKTSYAQKFQGRVTMTTDTSTGTAYMELRSLRSDDTAVYYCARSTGDGEYWGQGTLVTVSSGGGGQGGGGQGGGGQEIVMTQSPATLSVSPGERATLSCRASQSVSSNLAWYQQKPGQAPRLLIYGASTRATGIPARFSGGGSGTEFTLTISSLQSEDFAVYYCQQYHTWPVLTFGCGTKVEIKSGGGGQEVQLVESGGGLVQPGGSLKLSCAASGFTFNKYAINWVRQAPGKGLEWVARIRSKYNNYATYYADAVKDRFTISRDDSKNTVYLQMNNLKTEDTAVYYCARAGNFGSSYISYWAYWGQGTLVTVSSGGGGQGGGGQGGGGQQTVVTQEPSLTVSPGGTVTITCGSSTGAVTSGNYPNWVQKKPGQAPRGLIGGTKFLAPGTPARFSGSLSGGKAALTLSGVQPEDEAEYYCVLWYSNRWVFGSGTKLTVLGGGGCPPCPAPELLGGPSVFLFPPKPKDTLMISRTPEVTCVVVDVSHEEPEVKFNWYVDGVEVHNAKTKPCEEQYGSTYRCVSVLTVLHQDWLNGKEYKCKVSNKALPAPIEKTISKAKGQPREPQVYTLPPSREEMTKNQVSLTCLVKGFYPSDIAVEWESNGQPENNYKTTPPVLDSDGSFFLYSKLTVDKSRWQQGNVFSCSVMHEALHNHYTQKSLSLSPGKGGGGQGGGGQGGGGQGGGGQGGGGQGGGGQCPPCPAPELLGGPSVFLFPPKPKDTLMISRTPEVTCVVVDVSHEEPEVKFNWYVDGVEVHNAKTKPCEEQYGSTYRCVSVLTVLHQDWLNGKEYKCKVSNKALPAPIEKTISKAKGQPREPQVYTLPPSREEMTKNQVSLTCLVKGFYPSDIAVEWESNGQPENNYKTTPPVLDSDGSFFLYSKLTVDKSRWQQGNVFSCSVMHEALHNHYTQKSLSLSPGK

SEQ ID NO: 299 - protein, 496 aa, Artificial Sequence
  Synthetic
EVQLVESGGGLVQPDRSLRLSCAASGFTFRDYAMHWVRQAPGKCLEWVSGIAWNSDSIGYADSVKGRFTISRDNAKNSLFLQMHSLRPEDTALYFCAKDTLYGSGSPRAFDIWGQGTMVTVSSGGGGSGGGGSGGGGSEIVLTQSPATLSVSPGERATLSCRASQSVNNNLAWYQQKPGQAPRLLIYGASTRATGIPARFSGSGSGTEFTLTISRLEPEDFAVYYCQQSNNWPITFGCGTRLEIKSGGGGSQLQLQESGPGLVKPSETLSLTCFVSGGSISNSDYFWGWIRQPPGKCLEWIGTIYYSGRTYYNPSLKSRVTISVDTSKNQFSLMLSSVTAVDTAVYYCARYQYGSFDYWGQGTLVTVSSGGGGSGGGGSGGGGSDIVMTQTPLSLPVTPGEPASISCRSSQSLLHSNGYNYLDWYLQKPGQSPQLLIYLGSNRASGVPDRFSGSGSGTDFTLKISRVEAEDVGVYYCMQALQTPYTFGCGTKVEIR

SEQ ID NO: 300 - protein, 496 aa, Artificial Sequence
  Synthetic
EVQLVESGGGLVQPDRSLRLSCAASGFTFRDYAMHWVRQAPGKCLEWVSGIAWNSDSIGYADSVKGRFTISRDNAKNSLFLQMHSLRPEDTALYFCAKDTLYGSGSPRAFDIWGQGTMVTVSSGGGGQGGGGQGGGGQEIVLTQSPATLSVSPGERATLSCRASQSVNNNLAWYQQKPGQAPRLLIYGASTRATGIPARFSGSGSGTEFTLTISRLEPEDFAVYYCQQSNNWPITFGCGTRLEIKSGGGGQQLQLQESGPGLVKPSETLSLTCFVSGGSISNSDYFWGWIRQPPGKCLEWIGTIYYSGRTYYNPSLKSRVTISVDTSKNQFSLMLSSVTAVDTAVYYCARYQYGSFDYWGQGTLVTVSSGGGGQGGGGQGGGGQEIVMTQTPLSLPVTPGEPASISCRSSQSLLHSNGYNYLDWYLQKPGQSPQLLIYLGSNRASGVPDRFSGSGSGTDFTLKISRVEAEDVGVYYCMQALQTPYTFGCGTKVEIR

SEQ ID NO: 301 - protein, 751 aa, Artificial Sequence
  Synthetic
EVQLVESGGGLVQPDRSLRLSCAASGFTFRDYAMHWVRQAPGKCLEWVSGIAWNSDSIGYADSVKGRFTISRDNAKNSLFLQMHSLRPEDTALYFCAKDTLYGSGSPRAFDIWGQGTMVTVSSGGGGSGGGGSGGGGSEIVLTQSPATLSVSPGERATLSCRASQSVNNNLAWYQQKPGQAPRLLIYGASTRATGIPARFSGSGSGTEFTLTISRLEPEDFAVYYCQQSNNWPITFGCGTRLEIKSGGGGSQLQLQESGPGLVKPSETLSLTCFVSGGSISNSDYFWGWIRQPPGKCLEWIGTIYYSGRTYYNPSLKSRVTISVDTSKNQFSLMLSSVTAVDTAVYYCARYQYGSFDYWGQGTLVTVSSGGGGSGGGGSGGGGSDIVMTQTPLSLPVTPGEPASISCRSSQSLLHSNGYNYLDWYLQKPGQSPQLLIYLGSNRASGVPDRFSGSGSGTDFTLKISRVEAEDVGVYYCMQALQTPYTFGCGTKVEIRSGGGGSEVQLVESGGGLVQPGGSLKLSCAASGFTFNKYAMNWVRQAPGKGLEWVARIRSKYNNYATYYADSVKDRFTISRDDSKNTAYLQMNNLKTEDTAVYYCVRHGNFGNSYISYWAYWGQGTLVTVSSGGGGSGGGGSGGGGSQTVVTQEPSLTVSPGGTVTLTCGSSTGAVTSGNYPNWVQQKPGQAPRGLIGGTKFLAPGTPARFSGSLLGGKAALTLSGVQPEDEAEYYCVLWYSNRWVFGGGTKLTVL

SEQ ID NO: 302 - protein, 751 aa, Artificial Sequence
  Synthetic
EVQLVESGGGLVQPDRSLRLSCAASGFTFRDYAMHWVRQAPGKCLEWVSGIAWNSDSIGYADSVKGRFTISRDNAKNSLFLQMHSLRPEDTALYFCAKDTLYGSGSPRAFDIWGQGTMVTVSSGGGGQGGGGQGGGGQEIVLTQSPATLSVSPGERATLSCRASQSVNNNLAWYQQKPGQAPRLLIYGASTRATGIPARFSGSGSGTEFTLTISRLEPEDFAVYYCQQSNNWPITFGCGTRLEIKSGGGGQQLQLQESGPGLVKPSETLSLTCFVSGGSISNSDYFWGWIRQPPGKCLEWIGTIYYSGRTYYNPSLKSRVTISVDTSKNQFSLMLSSVTAVDTAVYYCARYQYGSFDYWGQGTLVTVSSGGGGQGGGGQGGGGQEIVMTQTPLSLPVTPGEPASISCRSSQSLLHSNGYNYLDWYLQKPGQSPQLLIYLGSNRASGVPDRFSGSGSGTDFTLKISRVEAEDVGVYYCMQALQTPYTFGCGTKVEIRSGGGGQEVQLVESGGGLVQPGGSLKLSCAASGFTFNKYAMNWVRQAPGKGLEWVARIRSKYNNYATYYADSVKDRFTISRDDSKNTAYLQMNNLKTEDTAVYYCVRHGNFGNSYISYWAYWGQGTLVTVSSGGGGQGGGGQGGGGQQTVVTQEPSLTVSPGGTVTLTCGSSTGAVTSGNYPNWVQQKPGQAPRGLIGGTKFLAPGTPARFSGSLLGGKAALTLSGVQPEDEAEYYCVLWYSNRWVFGGGTKLTVL

SEQ ID NO: 303 - protein, 751 aa, Artificial Sequence
  Synthetic
EVQLVESGGGLVQPDRSLRLSCAASGFTFRDYAMHWVRQAPGKCLEWVSGIAWNSDSIGYADSVKGRFTISRDNAKNSLFLQMHSLRPEDTALYFCAKDTLYGSGSPRAFDIWGQGTMVTVSSGGGGSGGGGSGGGGSEIVLTQSPATLSVSPGERATLSCRASQSVNNNLAWYQQKPGQAPRLLIYGASTRATGIPARFSGSGSGTEFTLTISRLEPEDFAVYYCQQSNNWPITFGCGTRLEIKSGGGGSQLQLQESGPGLVKPSETLSLTCFVSGGSISNSDYFWGWIRQPPGKCLEWIGTIYYSGRTYYNPSLKSRVTISVDTSKNQFSLMLSSVTAVDTAVYYCARYQYGSFDYWGQGTLVTVSSGGGGSGGGGSGGGGSDIVMTQTPLSLPVTPGEPASISCRSSQSLLHSNGYNYLDWYLQKPGQSPQLLIYLGSNRASGVPDRFSGSGSGTDFTLKISRVEAEDVGVYYCMQALQTPYTFGCGTKVEIRSGGGGSEVQLVESGGGLVQPGGSLKLSCAASGFTFNKYAINWVRQAPGKGLEWVARIRSKYNNYATYYADAVKDRFTISRDDSKNTVYLQMNNLKTEDTAVYYCARAGNFGSSYISYWAYWGQGTLVTVSSGGGGSGGGGSGGGGSQTVVTQEPSLTVSPGGTVTITCGSSTGAVTSGNYPNWVQKKPGQAPRGLIGGTKFLAPGTPARFSGSLSGGKAALTLSGVQPEDEAEYYCVLWYSNRWVFGSGTKLTVL

SEQ ID NO: 304 - protein, 751 aa, Artificial Sequence
  Synthetic
EVQLVESGGGLVQPDRSLRLSCAASGFTFRDYAMHWVRQAPGKCLEWVSGIAWNSDSIGYADSVKGRFTISRDNAKNSLFLQMHSLRPEDTALYFCAKDTLYGSGSPRAFDIWGQGTMVTVSSGGGGQGGGGQGGGGQEIVLTQSPATLSVSPGERATLSCRASQSVNNNLAWYQQKPGQAPRLLIYGASTRATGIPARFSGSGSGTEFTLTISRLEPEDFAVYYCQQSNNWPITFGCGTRLEIKSGGGGQQLQLQESGPGLVKPSETLSLTCFVSGGSISNSDYFWGWIRQPPGKCLEWIGTIYYSGRTYYNPSLKSRVTISVDTSKNQFSLMLSSVTAVDTAVYYCARYQYGSFDYWGQGTLVTVSSGGGGQGGGGQGGGGQEIVMTQTPLSLPVTPGEPASISCRSSQSLLHSNGYNYLDWYLQKPGQSPQLLIYLGSNRASGVPDRFSGSGSGTDFTLKISRVEAEDVGVYYCMQALQTPYTFGCGTKVEIRSGGGGQEVQLVESGGGLVQPGGSLKLSCAASGFTFNKYAINWVRQAPGKGLEWVARIRSKYNNYATYYADAVKDRFTISRDDSKNTVYLQMNNLKTEDTAVYYCARAGNFGSSYISYWAYWGQGTLVTVSSGGGGQGGGGQGGGGQQTVVTQEPSLTVSPGGTVTITCGSSTGAVTSGNYPNWVQKKPGQAPRGLIGGTKFLAPGTPARFSGSLSGGKAALTLSGVQPEDEAEYYCVLWYSNRWVFGSGTKLTVL

SEQ ID NO: 305 - protein, 1239 aa, Artificial Sequence
  Synthetic
EVQLVESGGGLVQPDRSLRLSCAASGFTFRDYAMHWVRQAPGKCLEWVSGIAWNSDSIGYADSVKGRFTISRDNAKNSLFLQMHSLRPEDTALYFCAKDTLYGSGSPRAFDIWGQGTMVTVSSGGGGSGGGGSGGGGSEIVLTQSPATLSVSPGERATLSCRASQSVNNNLAWYQQKPGQAPRLLIYGASTRATGIPARFSGSGSGTEFTLTISRLEPEDFAVYYCQQSNNWPITFGCGTRLEIKSGGGGSQLQLQESGPGLVKPSETLSLTCFVSGGSISNSDYFWGWIRQPPGKCLEWIGTIYYSGRTYYNPSLKSRVTISVDTSKNQFSLMLSSVTAVDTAVYYCARYQYGSFDYWGQGTLVTVSSGGGGSGGGGSGGGGSDIVMTQTPLSLPVTPGEPASISCRSSQSLLHSNGYNYLDWYLQKPGQSPQLLIYLGSNRASGVPDRFSGSGSGTDFTLKISRVEAEDVGVYYCMQALQTPYTFGCGTKVEIRSGGGGSEVQLVESGGGLVQPGGSLKLSCAASGFTFNKYAMNWVRQAPGKGLEWVARIRSKYNNYATYYADSVKDRFTISRDDSKNTAYLQMNNLKTEDTAVYYCVRHGNFGNSYISYWAYWGQGTLVTVSSGGGGSGGGGSGGGGSQTVVTQEPSLTVSPGGTVTLTCGSSTGAVTSGNYPNWVQQKPGQAPRGLIGGTKFLAPGTPARFSGSLLGGKAALTLSGVQPEDEAEYYCVLWYSNRWVFGGGTKLTVLGGGGDKTHTCPPCPAPELLGGPSVFLFPPKPKDTLMISRTPEVTCVVVDVSHEDPEVKFNWYVDGVEVHNAKTKPCEEQYGSTYRCVSVLTVLHQDWLNGKEYKCKVSNKALPAPIEKTISKAKGQPREPQVYTLPPSREEMTKNQVSLTCLVKGFYPSDIAVEWESNGQPENNYKTTPPVLDSDGSFFLYSKLTVDKSRWQQGNVFSCSVMHEALHNHYTQKSLSLSPGKGGGGSGGGGSGGGGSGGGGSGGGGSGGGGSDKTHTCPPCPAPELLGGPSVFLFPPKPKDTLMISRTPEVTCVVVDVSHEDPEVKFNWYVDGVEVHNAKTKPCEEQYGSTYRCVSVLTVLHQDWLNGKEYKCKVSNKALPAPIEKTISKAKGQPREPQVYTLPPSREEMTKNQVSLTCLVKGFYPSDIAVEWESNGQPENNYKTTPPVLDSDGSFFLYSKLTVDKSRWQQGNVFSCSVMHEALHNHYTQKSLSLSPGK

SEQ ID NO: 306 - protein, 1229 aa, Artificial Sequence
  Synthetic
EVQLVESGGGLVQPDRSLRLSCAASGFTFRDYAMHWVRQAPGKCLEWVSGIAWNSDSIGYADSVKGRFTISRDNAKNSLFLQMHSLRPEDTALYFCAKDTLYGSGSPRAFDIWGQGTMVTVSSGGGGQGGGGQGGGGQEIVLTQSPATLSVSPGERATLSCRASQSVNNNLAWYQQKPGQAPRLLIYGASTRATGIPARFSGSGSGTEFTLTISRLEPEDFAVYYCQQSNNWPITFGCGTRLEIKSGGGGQQLQLQESGPGLVKPSETLSLTCFVSGGSISNSDYFWGWIRQPPGKCLEWIGTIYYSGRTYYNPSLKSRVTISVDTSKNQFSLMLSSVTAVDTAVYYCARYQYGSFDYWGQGTLVTVSSGGGGQGGGGQGGGGQEIVMTQTPLSLPVTPGEPASISCRSSQSLLHSNGYNYLDWYLQKPGQSPQLLIYLGSNRASGVPDRFSGSGSGTDFTLKISRVEAEDVGVYYCMQALQTPYTFGCGTKVEIRSGGGGQEVQLVESGGGLVQPGGSLKLSCAASGFTFNKYAMNWVRQAPGKGLEWVARIRSKYNNYATYYADSVKDRFTISRDDSKNTAYLQMNNLKTEDTAVYYCVRHGNFGNSYISYWAYWGQGTLVTVSSGGGGQGGGGQGGGGQQTVVTQEPSLTVSPGGTVTLTCGSSTGAVTSGNYPNWVQQKPGQAPRGLIGGTKFLAPGTPARFSGSLLGGKAALTLSGVQPEDEAEYYCVLWYSNRWVFGGGTKLTVLGGGGCPPCPAPELLGGPSVFLFPPKPKDTLMISRTPEVTCVVVDVSHEEPEVKFNWYVDGVEVHNAKTKPCEEQYGSTYRCVSVLTVLHQDWLNGKEYKCKVSNKALPAPIEKTISKAKGQPREPQVYTLPPSREEMTKNQVSLTCLVKGFYPSDIAVEWESNGQPENNYKTTPPVLDSDGSFFLYSKLTVDKSRWQQGNVFSCSVMHEALHNHYTQKSLSLSPGKGGGGQGGGGQGGGGQGGGGQGGGGQGGGGQCPPCPAPELLGGPSVFLFPPKPKDTLMISRTPEVTCVVVDVSHEEPEVKFNWYVDGVEVHNAKTKPCEEQYGSTYRCVSVLTVLHQDWLNGKEYKCKVSNKALPAPIEKTISKAKGQPREPQVYTLPPSREEMTKNQVSLTCLVKGFYPSDIAVEWESNGQPENNYKTTPPVLDSDGSFFLYSKLTVDKSRWQQGNVFSCSVMHEALHNHYTQKSLSLSPGK

SEQ ID NO: 307 - protein, 1239 aa, Artificial Sequence
  Synthetic
EVQLVESGGGLVQPDRSLRLSCAASGFTFRDYAMHWVRQAPGKCLEWVSGIAWNSDSIGYADSVKGRFTISRDNAKNSLFLQMHSLRPEDTALYFCAKDTLYGSGSPRAFDIWGQGTMVTVSSGGGGSGGGGSGGGGSEIVLTQSPATLSVSPGERATLSCRASQSVNNNLAWYQQKPGQAPRLLIYGASTRATGIPARFSGSGSGTEFTLTISRLEPEDFAVYYCQQSNNWPITFGCGTRLEIKSGGGGSQLQLQESGPGLVKPSETLSLTCFVSGGSISNSDYFWGWIRQPPGKCLEWIGTIYYSGRTYYNPSLKSRVTISVDTSKNQFSLMLSSVTAVDTAVYYCARYQYGSFDYWGQGTLVTVSSGGGGSGGGGSGGGGSDIVMTQTPLSLPVTPGEPASISCRSSQSLLHSNGYNYLDWYLQKPGQSPQLLIYLGSNRASGVPDRFSGSGSGTDFTLKISRVEAEDVGVYYCMQALQTPYTFGCGTKVEIRSGGGGSEVQLVESGGGLVQPGGSLKLSCAASGFTFNKYAINWVRQAPGKGLEWVARIRSKYNNYATYYADAVKDRFTISRDDSKNTVYLQMNNLKTEDTAVYYCARAGNFGSSYISYWAYWGQGTLVTVSSGGGGSGGGGSGGGGSQTVVTQEPSLTVSPGGTVTITCGSSTGAVTSGNYPNWVQKKPGQAPRGLIGGTKFLAPGTPARFSGSLSGGKAALTLSGVQPEDEAEYYCVLWYSNRWVFGSGTKLTVLGGGGDKTHTCPPCPAPELLGGPSVFLFPPKPKDTLMISRTPEVTCVVVDVSHEDPEVKFNWYVDGVEVHNAKTKPCEEQYGSTYRCVSVLTVLHQDWLNGKEYKCKVSNKALPAPIEKTISKAKGQPREPQVYTLPPSREEMTKNQVSLTCLVKGFYPSDIAVEWESNGQPENNYKTTPPVLDSDGSFFLYSKLTVDKSRWQQGNVFSCSVMHEALHNHYTQKSLSLSPGKGGGGSGGGGSGGGGSGGGGSGGGGSGGGGSDKTHTCPPCPAPELLGGPSVFLFPPKPKDTLMISRTPEVTCVVVDVSHEDPEVKFNWYVDGVEVHNAKTKPCEEQYGSTYRCVSVLTVLHQDWLNGKEYKCKVSNKALPAPIEKTISKAKGQPREPQVYTLPPSREEMTKNQVSLTCLVKGFYPSDIAVEWESNGQPENNYKTTPPVLDSDGSFFLYSKLTVDKSRWQQGNVFSCSVMHEALHNHYTQKSLSLSPGK

SEQ ID NO: 308 - protein, 1229 aa, Artificial Sequence
  Synthetic
EVQLVESGGGLVQPDRSLRLSCAASGFTFRDYAMHWVRQAPGKCLEWVSGIAWNSDSIGYADSVKGRFTISRDNAKNSLFLQMHSLRPEDTALYFCAKDTLYGSGSPRAFDIWGQGTMVTVSSGGGGQGGGGQGGGGQEIVLTQSPATLSVSPGERATLSCRASQSVNNNLAWYQQKPGQAPRLLIYGASTRATGIPARFSGSGSGTEFTLTISRLEPEDFAVYYCQQSNNWPITFGCGTRLEIKSGGGGQQLQLQESGPGLVKPSETLSLTCFVSGGSISNSDYFWGWIRQPPGKCLEWIGTIYYSGRTYYNPSLKSRVTISVDTSKNQFSLMLSSVTAVDTAVYYCARYQYGSFDYWGQGTLVTVSSGGGGQGGGGQGGGGQEIVMTQTPLSLPVTPGEPASISCRSSQSLLHSNGYNYLDWYLQKPGQSPQLLIYLGSNRASGVPDRFSGSGSGTDFTLKISRVEAEDVGVYYCMQALQTPYTFGCGTKVEIRSGGGGQEVQLVESGGGLVQPGGSLKLSCAASGFTFNKYAINWVRQAPGKGLEWVARIRSKYNNYATYYADAVKDRFTISRDDSKNTVYLQMNNLKTEDTAVYYCARAGNFGSSYISYWAYWGQGTLVTVSSGGGGQGGGGQGGGGQQTVVTQEPSLTVSPGGTVTITCGSSTGAVTSGNYPNWVQKKPGQAPRGLIGGTKFLAPGTPARFSGSLSGGKAALTLSGVQPEDEAEYYCVLWYSNRWVFGSGTKLTVLGGGGCPPCPAPELLGGPSVFLFPPKPKDTLMISRTPEVTCVVVDVSHEEPEVKFNWYVDGVEVHNAKTKPCEEQYGSTYRCVSVLTVLHQDWLNGKEYKCKVSNKALPAPIEKTISKAKGQPREPQVYTLPPSREEMTKNQVSLTCLVKGFYPSDIAVEWESNGQPENNYKTTPPVLDSDGSFFLYSKLTVDKSRWQQGNVFSCSVMHEALHNHYTQKSLSLSPGKGGGGQGGGGQGGGGQGGGGQGGGGQGGGGQCPPCPAPELLGGPSVFLFPPKPKDTLMISRTPEVTCVVVDVSHEEPEVKFNWYVDGVEVHNAKTKPCEEQYGSTYRCVSVLTVLHQDWLNGKEYKCKVSNKALPAPIEKTISKAKGQPREPQVYTLPPSREEMTKNQVSLTCLVKGFYPSDIAVEWESNGQPENNYKTTPPVLDSDGSFFLYSKLTVDKSRWQQGNVFSCSVMHEALHNHYTQKSLSLSPGK

SEQ ID NO: 309 - protein, 498 aa, Artificial Sequence
  Synthetic
EVQLVESGGGLVQPDRSLRLSCAASGFTFRDYAMHWVRQAPGKCLEWVSGIAWNSDSIGYADSVKGRFTISRDNAKNSLFLQMHSLRPEDTALYFCAKDTLYGSGSPRAFDIWGQGTMVTVSSGGGGSGGGGSGGGGSEIVLTQSPATLSVSPGERATLSCRASQSVNNNLAWYQQKPGQAPRLLIYGASTRATGIPARFSGSGSGTEFTLTISRLEPEDFAVYYCQQSNNWPITFGCGTRLEIKSGGGGSQVQLVESGGGVVQPGRSLRLSCAASGFTFSAYGMHWVRQAPGKCLEWVAVILYDGSNKYYADSVKGRFTISRDNSKNTLYLQMNSLRAEDTAVYYCARGSGWLQLGDYFDYWGQGTLVTVSSGGGGSGGGGSGGGGSQSALTQPPSVSGSPGQSITISCTGTSSDVGGYNYVSWYQQHPGKAPKLMIYEVSNRPSGVSNRFSGSKSGNTASLTISGLQAEDEADYYCSSYTSSSTLVFGCGTKLTVL

SEQ ID NO: 310 - protein, 498 aa, Artificial Sequence
  Synthetic
EVQLVESGGGLVQPDRSLRLSCAASGFTFRDYAMHWVRQAPGKCLEWVSGIAWNSDSIGYADSVKGRFTISRDNAKNSLFLQMHSLRPEDTALYFCAKDTLYGSGSPRAFDIWGQGTMVTVSSGGGGQGGGGQGGGGQEIVLTQSPATLSVSPGERATLSCRASQSVNNNLAWYQQKPGQAPRLLIYGASTRATGIPARFSGSGSGTEFTLTISRLEPEDFAVYYCQQSNNWPITFGCGTRLEIKSGGGGQQVQLVESGGGVVQPGRSLRLSCAASGFTFSAYGMHWVRQAPGKCLEWVAVILYDGSNKYYADSVKGRFTISRDNSKNTLYLQMNSLRAEDTAVYYCARGSGWLQLGDYFDYWGQGTLVTVSSGGGGQGGGGQGGGGQQSALTQPPSVSGSPGQSITISCTGTSSDVGGYNYVSWYQQHPGKAPKLMIYEVSNRPSGVSNRFSGSKSGNTASLTISGLQAEDEADYYCSSYTSSSTLVFGCGTKLTVL

SEQ ID NO: 311 - protein, 753 aa, Artificial Sequence
  Synthetic
EVQLVESGGGLVQPDRSLRLSCAASGFTFRDYAMHWVRQAPGKCLEWVSGIAWNSDSIGYADSVKGRFTISRDNAKNSLFLQMHSLRPEDTALYFCAKDTLYGSGSPRAFDIWGQGTMVTVSSGGGGSGGGGSGGGGSEIVLTQSPATLSVSPGERATLSCRASQSVNNNLAWYQQKPGQAPRLLIYGASTRATGIPARFSGSGSGTEFTLTISRLEPEDFAVYYCQQSNNWPITFGCGTRLEIKSGGGGSQVQLVESGGGVVQPGRSLRLSCAASGFTFSAYGMHWVRQAPGKCLEWVAVILYDGSNKYYADSVKGRFTISRDNSKNTLYLQMNSLRAEDTAVYYCARGSGWLQLGDYFDYWGQGTLVTVSSGGGGSGGGGSGGGGSQSALTQPPSVSGSPGQSITISCTGTSSDVGGYNYVSWYQQHPGKAPKLMIYEVSNRPSGVSNRFSGSKSGNTASLTISGLQAEDEADYYCSSYTSSSTLVFGCGTKLTVLSGGGGSEVQLVESGGGLVQPGGSLKLSCAASGFTFNKYAMNWVRQAPGKGLEWVARIRSKYNNYATYYADSVKDRFTISRDDSKNTAYLQMNNLKTEDTAVYYCVRHGNFGNSYISYWAYWGQGTLVTVSSGGGGSGGGGSGGGGSQTVVTQEPSLTVSPGGTVTLTCGSSTGAVTSGNYPNWVQQKPGQAPRGLIGGTKFLAPGTPARFSGSLLGGKAALTLSGVQPEDEAEYYCVLWYSNRWVFGGGTKLTVL

SEQ ID NO: 312 - protein, 753 aa, Artificial Sequence
  Synthetic
EVQLVESGGGLVQPDRSLRLSCAASGFTFRDYAMHWVRQAPGKCLEWVSGIAWNSDSIGYADSVKGRFTISRDNAKNSLFLQMHSLRPEDTALYFCAKDTLYGSGSPRAFDIWGQGTMVTVSSGGGGQGGGGQGGGGQEIVLTQSPATLSVSPGERATLSCRASQSVNNNLAWYQQKPGQAPRLLIYGASTRATGIPARFSGSGSGTEFTLTISRLEPEDFAVYYCQQSNNWPITFGCGTRLEIKSGGGGQQVQLVESGGGVVQPGRSLRLSCAASGFTFSAYGMHWVRQAPGKCLEWVAVILYDGSNKYYADSVKGRFTISRDNSKNTLYLQMNSLRAEDTAVYYCARGSGWLQLGDYFDYWGQGTLVTVSSGGGGQGGGGQGGGGQQSALTQPPSVSGSPGQSITISCTGTSSDVGGYNYVSWYQQHPGKAPKLMIYEVSNRPSGVSNRFSGSKSGNTASLTISGLQAEDEADYYCSSYTSSSTLVFGCGTKLTVLSGGGGQEVQLVESGGGLVQPGGSLKLSCAASGFTFNKYAMNWVRQAPGKGLEWVARIRSKYNNYATYYADSVKDRFTISRDDSKNTAYLQMNNLKTEDTAVYYCVRHGNFGNSYISYWAYWGQGTLVTVSSGGGGQGGGGQGGGGQQTVVTQEPSLTVSPGGTVTLTCGSSTGAVTSGNYPNWVQQKPGQAPRGLIGGTKFLAPGTPARFSGSLLGGKAALTLSGVQPEDEAEYYCVLWYSNRWVFGGGTKLTVL

SEQ ID NO: 313 - protein, 753 aa, Artificial Sequence
  Synthetic
EVQLVESGGGLVQPDRSLRLSCAASGFTFRDYAMHWVRQAPGKCLEWVSGIAWNSDSIGYADSVKGRFTISRDNAKNSLFLQMHSLRPEDTALYFCAKDTLYGSGSPRAFDIWGQGTMVTVSSGGGGSGGGGSGGGGSEIVLTQSPATLSVSPGERATLSCRASQSVNNNLAWYQQKPGQAPRLLIYGASTRATGIPARFSGSGSGTEFTLTISRLEPEDFAVYYCQQSNNWPITFGCGTRLEIKSGGGGSQVQLVESGGGVVQPGRSLRLSCAASGFTFSAYGMHWVRQAPGKCLEWVAVILYDGSNKYYADSVKGRFTISRDNSKNTLYLQMNSLRAEDTAVYYCARGSGWLQLGDYFDYWGQGTLVTVSSGGGGSGGGGSGGGGSQSALTQPPSVSGSPGQSITISCTGTSSDVGGYNYVSWYQQHPGKAPKLMIYEVSNRPSGVSNRFSGSKSGNTASLTISGLQAEDEADYYCSSYTSSSTLVFGCGTKLTVLSGGGGSEVQLVESGGGLVQPGGSLKLSCAASGFTFNKYAINWVRQAPGKGLEWVARIRSKYNNYATYYADAVKDRFTISRDDSKNTVYLQMNNLKTEDTAVYYCARAGNFGSSYISYWAYWGQGTLVTVSSGGGGSGGGGSGGGGSQTVVTQEPSLTVSPGGTVTITCGSSTGAVTSGNYPNWVQKKPGQAPRGLIGGTKFLAPGTPARFSGSLSGGKAALTLSGVQPEDEAEYYCVLWYSNRWVFGSGTKLTVL

SEQ ID NO: 314 - protein, 753 aa, Artificial Sequence
  Synthetic
EVQLVESGGGLVQPDRSLRLSCAASGFTFRDYAMHWVRQAPGKCLEWVSGIAWNSDSIGYADSVKGRFTISRDNAKNSLFLQMHSLRPEDTALYFCAKDTLYGSGSPRAFDIWGQGTMVTVSSGGGGQGGGGQGGGGQEIVLTQSPATLSVSPGERATLSCRASQSVNNNLAWYQQKPGQAPRLLIYGASTRATGIPARFSGSGSGTEFTLTISRLEPEDFAVYYCQQSNNWPITFGCGTRLEIKSGGGGQQVQLVESGGGVVQPGRSLRLSCAASGFTFSAYGMHWVRQAPGKCLEWVAVILYDGSNKYYADSVKGRFTISRDNSKNTLYLQMNSLRAEDTAVYYCARGSGWLQLGDYFDYWGQGTLVTVSSGGGGQGGGGQGGGGQQSALTQPPSVSGSPGQSITISCTGTSSDVGGYNYVSWYQQHPGKAPKLMIYEVSNRPSGVSNRFSGSKSGNTASLTISGLQAEDEADYYCSSYTSSSTLVFGCGTKLTVLSGGGGQEVQLVESGGGLVQPGGSLKLSCAASGFTFNKYAINWVRQAPGKGLEWVARIRSKYNNYATYYADAVKDRFTISRDDSKNTVYLQMNNLKTEDTAVYYCARAGNFGSSYISYWAYWGQGTLVTVSSGGGGQGGGGQGGGGQQTVVTQEPSLTVSPGGTVTITCGSSTGAVTSGNYPNWVQKKPGQAPRGLIGGTKFLAPGTPARFSGSLSGGKAALTLSGVQPEDEAEYYCVLWYSNRWVFGSGTKLTVL

SEQ ID NO: 315 - protein, 1241 aa, Artificial Sequence
  Synthetic
EVQLVESGGGLVQPDRSLRLSCAASGFTFRDYAMHWVRQAPGKCLEWVSGIAWNSDSIGYADSVKGRFTISRDNAKNSLFLQMHSLRPEDTALYFCAKDTLYGSGSPRAFDIWGQGTMVTVSSGGGGSGGGGSGGGGSEIVLTQSPATLSVSPGERATLSCRASQSVNNNLAWYQQKPGQAPRLLIYGASTRATGIPARFSGSGSGTEFTLTISRLEPEDFAVYYCQQSNNWPITFGCGTRLEIKSGGGGSQVQLVESGGGVVQPGRSLRLSCAASGFTFSAYGMHWVRQAPGKCLEWVAVILYDGSNKYYADSVKGRFTISRDNSKNTLYLQMNSLRAEDTAVYYCARGSGWLQLGDYFDYWGQGTLVTVSSGGGGSGGGGSGGGGSQSALTQPPSVSGSPGQSITISCTGTSSDVGGYNYVSWYQQHPGKAPKLMIYEVSNRPSGVSNRFSGSKSGNTASLTISGLQAEDEADYYCSSYTSSSTLVFGCGTKLTVLSGGGGSEVQLVESGGGLVQPGGSLKLSCAASGFTFNKYAMNWVRQAPGKGLEWVARIRSKYNNYATYYADSVKDRFTISRDDSKNTAYLQMNNLKTEDTAVYYCVRHGNFGNSYISYWAYWGQGTLVTVSSGGGGSGGGGSGGGGSQTVVTQEPSLTVSPGGTVTLTCGSSTGAVTSGNYPNWVQQKPGQAPRGLIGGTKFLAPGTPARFSGSLLGGKAALTLSGVQPEDEAEYYCVLWYSNRWVFGGGTKLTVLGGGGDKTHTCPPCPAPELLGGPSVFLFPPKPKDTLMISRTPEVTCVVVDVSHEDPEVKFNWYVDGVEVHNAKTKPCEEQYGSTYRCVSVLTVLHQDWLNGKEYKCKVSNKALPAPIEKTISKAKGQPREPQVYTLPPSREEMTKNQVSLTCLVKGFYPSDIAVEWESNGQPENNYKTTPPVLDSDGSFFLYSKLTVDKSRWQQGNVFSCSVMHEALHNHYTQKSLSLSPGKGGGGSGGGGSGGGGSGGGGSGGGGSGGGGSDKTHTCPPCPAPELLGGPSVFLFPPKPKDTLMISRTPEVTCVVVDVSHEDPEVKFNWYVDGVEVHNAKTKPCEEQYGSTYRCVSVLTVLHQDWLNGKEYKCKVSNKALPAPIEKTISKAKGQPREPQVYTLPPSREEMTKNQVSLTCLVKGFYPSDIAVEWESNGQPENNYKTTPPVLDSDGSFFLYSKLTVDKSRWQQGNVFSCSVMHEALHNHYTQKSLSLSPGK

SEQ ID NO: 316 - protein, 1231 aa, Artificial Sequence
  Synthetic
EVQLVESGGGLVQPDRSLRLSCAASGFTFRDYAMHWVRQAPGKCLEWVSGIAWNSDSIGYADSVKGRFTISRDNAKNSLFLQMHSLRPEDTALYFCAKDTLYGSGSPRAFDIWGQGTMVTVSSGGGGQGGGGQGGGGQEIVLTQSPATLSVSPGERATLSCRASQSVNNNLAWYQQKPGQAPRLLIYGASTRATGIPARFSGSGSGTEFTLTISRLEPEDFAVYYCQQSNNWPITFGCGTRLEIKSGGGGQQVQLVESGGGVVQPGRSLRLSCAASGFTFSAYGMHWVRQAPGKCLEWVAVILYDGSNKYYADSVKGRFTISRDNSKNTLYLQMNSLRAEDTAVYYCARGSGWLQLGDYFDYWGQGTLVTVSSGGGGQGGGGQGGGGQQSALTQPPSVSGSPGQSITISCTGTSSDVGGYNYVSWYQQHPGKAPKLMIYEVSNRPSGVSNRFSGSKSGNTASLTISGLQAEDEADYYCSSYTSSSTLVFGCGTKLTVLSGGGGQEVQLVESGGGLVQPGGSLKLSCAASGFTFNKYAMNWVRQAPGKGLEWVARIRSKYNNYATYYADSVKDRFTISRDDSKNTAYLQMNNLKTEDTAVYYCVRHGNFGNSYISYWAYWGQGTLVTVSSGGGGQGGGGQGGGGQQTVVTQEPSLTVSPGGTVTLTCGSSTGAVTSGNYPNWVQQKPGQAPRGLIGGTKFLAPGTPARFSGSLLGGKAALTLSGVQPEDEAEYYCVLWYSNRWVFGGGTKLTVLGGGGCPPCPAPELLGGPSVFLFPPKPKDTLMISRTPEVTCVVVDVSHEEPEVKFNWYVDGVEVHNAKTKPCEEQYGSTYRCVSVLTVLHQDWLNGKEYKCKVSNKALPAPIEKTISKAKGQPREPQVYTLPPSREEMTKNQVSLTCLVKGFYPSDIAVEWESNGQPENNYKTTPPVLDSDGSFFLYSKLTVDKSRWQQGNVFSCSVMHEALHNHYTQKSLSLSPGKGGGGQGGGGQGGGGQGGGGQGGGGQGGGGQCPPCPAPELLGGPSVFLFPPKPKDTLMISRTPEVTCVVVDVSHEEPEVKFNWYVDGVEVHNAKTKPCEEQYGSTYRCVSVLTVLHQDWLNGKEYKCKVSNKALPAPIEKTISKAKGQPREPQVYTLPPSREEMTKNQVSLTCLVKGFYPSDIAVEWESNGQPENNYKTTPPVLDSDGSFFLYSKLTVDKSRWQQGNVFSCSVMHEALHNHYTQKSLSLSPGK

SEQ ID NO: 317 - protein, 1241 aa, Artificial Sequence
  Synthetic
EVQLVESGGGLVQPDRSLRLSCAASGFTFRDYAMHWVRQAPGKCLEWVSGIAWNSDSIGYADSVKGRFTISRDNAKNSLFLQMHSLRPEDTALYFCAKDTLYGSGSPRAFDIWGQGTMVTVSSGGGGSGGGGSGGGGSEIVLTQSPATLSVSPGERATLSCRASQSVNNNLAWYQQKPGQAPRLLIYGASTRATGIPARFSGSGSGTEFTLTISRLEPEDFAVYYCQQSNNWPITFGCGTRLEIKSGGGGSQVQLVESGGGVVQPGRSLRLSCAASGFTFSAYGMHWVRQAPGKCLEWVAVILYDGSNKYYADSVKGRFTISRDNSKNTLYLQMNSLRAEDTAVYYCARGSGWLQLGDYFDYWGQGTLVTVSSGGGGSGGGGSGGGGSQSALTQPPSVSGSPGQSITISCTGTSSDVGGYNYVSWYQQHPGKAPKLMIYEVSNRPSGVSNRFSGSKSGNTASLTISGLQAEDEADYYCSSYTSSSTLVFGCGTKLTVLSGGGGSEVQLVESGGGLVQPGGSLKLSCAASGFTFNKYAINWVRQAPGKGLEWVARIRSKYNNYATYYADAVKDRFTISRDDSKNTVYLQMNNLKTEDTAVYYCARAGNFGSSYISYWAYWGQGTLVTVSSGGGGSGGGGSGGGGSQTVVTQEPSLTVSPGGTVTITCGSSTGAVTSGNYPNWVQKKPGQAPRGLIGGTKFLAPGTPARFSGSLSGGKAALTLSGVQPEDEAEYYCVLWYSNRWVFGSGTKLTVLGGGGDKTHTCPPCPAPELLGGPSVFLFPPKPKDTLMISRTPEVTCVVVDVSHEDPEVKFNWYVDGVEVHNAKTKPCEEQYGSTYRCVSVLTVLHQDWLNGKEYKCKVSNKALPAPIEKTISKAKGQPREPQVYTLPPSREEMTKNQVSLTCLVKGFYPSDIAVEWESNGQPENNYKTTPPVLDSDGSFFLYSKLTVDKSRWQQGNVFSCSVMHEALHNHYTQKSLSLSPGKGGGGSGGGGSGGGGSGGGGSGGGGSGGGGSDKTHTCPPCPAPELLGGPSVFLFPPKPKDTLMISRTPEVTCVVVDVSHEDPEVKFNWYVDGVEVHNAKTKPCEEQYGSTYRCVSVLTVLHQDWLNGKEYKCKVSNKALPAPIEKTISKAKGQPREPQVYTLPPSREEMTKNQVSLTCLVKGFYPSDIAVEWESNGQPENNYKTTPPVLDSDGSFFLYSKLTVDKSRWQQGNVFSCSVMHEALHNHYTQKSLSLSPGK

SEQ ID NO: 318 - protein, 1231 aa, Artificial Sequence
  Synthetic
EVQLVESGGGLVQPDRSLRLSCAASGFTFRDYAMHWVRQAPGKCLEWVSGIAWNSDSIGYADSVKGRFTISRDNAKNSLFLQMHSLRPEDTALYFCAKDTLYGSGSPRAFDIWGQGTMVTVSSGGGGQGGGGQGGGGQEIVLTQSPATLSVSPGERATLSCRASQSVNNNLAWYQQKPGQAPRLLIYGASTRATGIPARFSGSGSGTEFTLTISRLEPEDFAVYYCQQSNNWPITFGCGTRLEIKSGGGGQQVQLVESGGGVVQPGRSLRLSCAASGFTFSAYGMHWVRQAPGKCLEWVAVILYDGSNKYYADSVKGRFTISRDNSKNTLYLQMNSLRAEDTAVYYCARGSGWLQLGDYFDYWGQGTLVTVSSGGGGQGGGGQGGGGQQSALTQPPSVSGSPGQSITISCTGTSSDVGGYNYVSWYQQHPGKAPKLMIYEVSNRPSGVSNRFSGSKSGNTASLTISGLQAEDEADYYCSSYTSSSTLVFGCGTKLTVLSGGGGQEVQLVESGGGLVQPGGSLKLSCAASGFTFNKYAINWVRQAPGKGLEWVARIRSKYNNYATYYADAVKDRFTISRDDSKNTVYLQMNNLKTEDTAVYYCARAGNFGSSYISYWAYWGQGTLVTVSSGGGGQGGGGQGGGGQQTVVTQEPSLTVSPGGTVTITCGSSTGAVTSGNYPNWVQKKPGQAPRGLIGGTKFLAPGTPARFSGSLSGGKAALTLSGVQPEDEAEYYCVLWYSNRWVFGSGTKLTVLGGGGCPPCPAPELLGGPSVFLFPPKPKDTLMISRTPEVTCVVVDVSHEEPEVKFNWYVDGVEVHNAKTKPCEEQYGSTYRCVSVLTVLHQDWLNGKEYKCKVSNKALPAPIEKTISKAKGQPREPQVYTLPPSREEMTKNQVSLTCLVKGFYPSDIAVEWESNGQPENNYKTTPPVLDSDGSFFLYSKLTVDKSRWQQGNVFSCSVMHEALHNHYTQKSLSLSPGKGGGGQGGGGQGGGGQGGGGQGGGGQGGGGQCPPCPAPELLGGPSVFLFPPKPKDTLMISRTPEVTCVVVDVSHEEPEVKFNWYVDGVEVHNAKTKPCEEQYGSTYRCVSVLTVLHQDWLNGKEYKCKVSNKALPAPIEKTISKAKGQPREPQVYTLPPSREEMTKNQVSLTCLVKGFYPSDIAVEWESNGQPENNYKTTPPVLDSDGSFFLYSKLTVDKSRWQQGNVFSCSVMHEALHNHYTQKSLSLSPGK

SEQ ID NO: 319 - protein, 491 aa, Artificial Sequence
  Synthetic
EVQLLESGGGLVQPGGSLRLSCAASGFTFSGHAMTWVRQAPGKCLEWLSTIYGSGGYTYYAGSVKGRFTISRDNSKNTLYLQMNSLRAEDTAVYYCAKVGGYDWYFDLWGRGTLVTVSSGGGGSGGGGSGGGGSSYELTQPPSVSVALGQTARITCGGHNIGSKNVHWYQQKPGQAPVLVIYRDTNRPSGIPERFSGSNSGNTATLTISRAQAGDEADYYCQLWDSTTVVFGCGTKLTVLSGGGGSQVQLVQSGGEVKKPGASVKVSCKASGYTFTSYGISWVRQAPGQCLEWMGWISAYTGETLYAQKLQGRVTMTRDTSTSTAYMELRSLRSDDTAVYYCARDPDYYGSGSYSDYWGQGTLVTVSSGGGGSGGGGSGGGGSEIVLTQSPATLSVSPGERATLSCRASQSVSSNLAWYQQKPGQAPRLLIYGASSRATGIPARFSGSGSGTEFTLTISSLQSEDFAVYYCQQYHSWPLLTFGCGTKVEIK

SEQ ID NO: 320 - protein, 491 aa, Artificial Sequence
  Synthetic
EVQLLESGGGLVQPGGSLRLSCAASGFTFSGHAMTWVRQAPGKCLEWLSTIYGSGGYTYYAGSVKGRFTISRDNSKNTLYLQMNSLRAEDTAVYYCAKVGGYDWYFDLWGRGTLVTVSSGGGGQGGGGQGGGGQSYELTQPPSVSVALGQTARITCGGHNIGSKNVHWYQQKPGQAPVLVIYRDTNRPSGIPERFSGSNSGNTATLTISRAQAGDEADYYCQLWDSTTVVFGCGTKLTVLSGGGGQQVQLVQSGGEVKKPGASVKVSCKASGYTFTSYGISWVRQAPGQCLEWMGWISAYTGETLYAQKLQGRVTMTRDTSTSTAYMELRSLRSDDTAVYYCARDPDYYGSGSYSDYWGQGTLVTVSSGGGGQGGGGQGGGGQEIVLTQSPATLSVSPGERATLSCRASQSVSSNLAWYQQKPGQAPRLLIYGASSRATGIPARFSGSGSGTEFTLTISSLQSEDFAVYYCQQYHSWPLLTFGCGTKVEIK

SEQ ID NO: 321 - protein, 746 aa, Artificial Sequence
  Synthetic
EVQLLESGGGLVQPGGSLRLSCAASGFTFSGHAMTWVRQAPGKCLEWLSTIYGSGGYTYYAGSVKGRFTISRDNSKNTLYLQMNSLRAEDTAVYYCAKVGGYDWYFDLWGRGTLVTVSSGGGGSGGGGSGGGGSSYELTQPPSVSVALGQTARITCGGHNIGSKNVHWYQQKPGQAPVLVIYRDTNRPSGIPERFSGSNSGNTATLTISRAQAGDEADYYCQLWDSTTVVFGCGTKLTVLSGGGGSQVQLVQSGGEVKKPGASVKVSCKASGYTFTSYGISWVRQAPGQCLEWMGWISAYTGETLYAQKLQGRVTMTRDTSTSTAYMELRSLRSDDTAVYYCARDPDYYGSGSYSDYWGQGTLVTVSSGGGGSGGGGSGGGGSEIVLTQSPATLSVSPGERATLSCRASQSVSSNLAWYQQKPGQAPRLLIYGASSRATGIPARFSGSGSGTEFTLTISSLQSEDFAVYYCQQYHSWPLLTFGCGTKVEIKSGGGGSEVQLVESGGGLVQPGGSLKLSCAASGFTFNKYAMNWVRQAPGKGLEWVARIRSKYNNYATYYADSVKDRFTISRDDSKNTAYLQMNNLKTEDTAVYYCVRHGNFGNSYISYWAYWGQGTLVTVSSGGGGSGGGGSGGGGSQTVVTQEPSLTVSPGGTVTLTCGSSTGAVTSGNYPNWVQQKPGQAPRGLIGGTKFLAPGTPARFSGSLLGGKAALTLSGVQPEDEAEYYCVLWYSNRWVFGGGTKLTVL

SEQ ID NO: 322 - protein, 746 aa, Artificial Sequence
  Synthetic
EVQLLESGGGLVQPGGSLRLSCAASGFTFSGHAMTWVRQAPGKCLEWLSTIYGSGGYTYYAGSVKGRFTISRDNSKNTLYLQMNSLRAEDTAVYYCAKVGGYDWYFDLWGRGTLVTVSSGGGGQGGGGQGGGGQSYELTQPPSVSVALGQTARITCGGHNIGSKNVHWYQQKPGQAPVLVIYRDTNRPSGIPERFSGSNSGNTATLTISRAQAGDEADYYCQLWDSTTVVFGCGTKLTVLSGGGGQQVQLVQSGGEVKKPGASVKVSCKASGYTFTSYGISWVRQAPGQCLEWMGWISAYTGETLYAQKLQGRVTMTRDTSTSTAYMELRSLRSDDTAVYYCARDPDYYGSGSYSDYWGQGTLVTVSSGGGGQGGGGQGGGGQEIVLTQSPATLSVSPGERATLSCRASQSVSSNLAWYQQKPGQAPRLLIYGASSRATGIPARFSGSGSGTEFTLTISSLQSEDFAVYYCQQYHSWPLLTFGCGTKVEIKSGGGGQEVQLVESGGGLVQPGGSLKLSCAASGFTFNKYAMNWVRQAPGKGLEWVARIRSKYNNYATYYADSVKDRFTISRDDSKNTAYLQMNNLKTEDTAVYYCVRHGNFGNSYISYWAYWGQGTLVTVSSGGGGQGGGGQGGGGQQTVVTQEPSLTVSPGGTVTLTCGSSTGAVTSGNYPNWVQQKPGQAPRGLIGGTKFLAPGTPARFSGSLLGGKAALTLSGVQPEDEAEYYCVLWYSNRWVFGGGTKLTVL

SEQ ID NO: 323 - protein, 746 aa, Artificial Sequence
  Synthetic
EVQLLESGGGLVQPGGSLRLSCAASGFTFSGHAMTWVRQAPGKCLEWLSTIYGSGGYTYYAGSVKGRFTISRDNSKNTLYLQMNSLRAEDTAVYYCAKVGGYDWYFDLWGRGTLVTVSSGGGGSGGGGSGGGGSSYELTQPPSVSVALGQTARITCGGHNIGSKNVHWYQQKPGQAPVLVIYRDTNRPSGIPERFSGSNSGNTATLTISRAQAGDEADYYCQLWDSTTVVFGCGTKLTVLSGGGGSQVQLVQSGGEVKKPGASVKVSCKASGYTFTSYGISWVRQAPGQCLEWMGWISAYTGETLYAQKLQGRVTMTRDTSTSTAYMELRSLRSDDTAVYYCARDPDYYGSGSYSDYWGQGTLVTVSSGGGGSGGGGSGGGGSEIVLTQSPATLSVSPGERATLSCRASQSVSSNLAWYQQKPGQAPRLLIYGASSRATGIPARFSGSGSGTEFTLTISSLQSEDFAVYYCQQYHSWPLLTFGCGTKVEIKSGGGGSEVQLVESGGGLVQPGGSLKLSCAASGFTFNKYAINWVRQAPGKGLEWVARIRSKYNNYATYYADAVKDRFTISRDDSKNTVYLQMNNLKTEDTAVYYCARAGNFGSSYISYWAYWGQGTLVTVSSGGGGSGGGGSGGGGSQTVVTQEPSLTVSPGGTVTITCGSSTGAVTSGNYPNWVQKKPGQAPRGLIGGTKFLAPGTPARFSGSLSGGKAALTLSGVQPEDEAEYYCVLWYSNRWVFGSGTKLTVL

SEQ ID NO: 324 - protein, 746 aa, Artificial Sequence
  Synthetic
EVQLLESGGGLVQPGGSLRLSCAASGFTFSGHAMTWVRQAPGKCLEWLSTIYGSGGYTYYAGSVKGRFTISRDNSKNTLYLQMNSLRAEDTAVYYCAKVGGYDWYFDLWGRGTLVTVSSGGGGQGGGGQGGGGQSYELTQPPSVSVALGQTARITCGGHNIGSKNVHWYQQKPGQAPVLVIYRDTNRPSGIPERFSGSNSGNTATLTISRAQAGDEADYYCQLWDSTTVVFGCGTKLTVLSGGGGQQVQLVQSGGEVKKPGASVKVSCKASGYTFTSYGISWVRQAPGQCLEWMGWISAYTGETLYAQKLQGRVTMTRDTSTSTAYMELRSLRSDDTAVYYCARDPDYYGSGSYSDYWGQGTLVTVSSGGGGQGGGGQGGGGQEIVLTQSPATLSVSPGERATLSCRASQSVSSNLAWYQQKPGQAPRLLIYGASSRATGIPARFSGSGSGTEFTLTISSLQSEDFAVYYCQQYHSWPLLTFGCGTKVEIKSGGGGQEVQLVESGGGLVQPGGSLKLSCAASGFTFNKYAINWVRQAPGKGLEWVARIRSKYNNYATYYADAVKDRFTISRDDSKNTVYLQMNNLKTEDTAVYYCARAGNFGSSYISYWAYWGQGTLVTVSSGGGGQGGGGQGGGGQQTVVTQEPSLTVSPGGTVTITCGSSTGAVTSGNYPNWVQKKPGQAPRGLIGGTKFLAPGTPARFSGSLSGGKAALTLSGVQPEDEAEYYCVLWYSNRWVFGSGTKLTVL

SEQ ID NO: 325 - protein, 1234 aa, Artificial Sequence
  Synthetic
EVQLLESGGGLVQPGGSLRLSCAASGFTFSGHAMTWVRQAPGKCLEWLSTIYGSGGYTYYAGSVKGRFTISRDNSKNTLYLQMNSLRAEDTAVYYCAKVGGYDWYFDLWGRGTLVTVSSGGGGSGGGGSGGGGSSYELTQPPSVSVALGQTARITCGGHNIGSKNVHWYQQKPGQAPVLVIYRDTNRPSGIPERFSGSNSGNTATLTISRAQAGDEADYYCQLWDSTTVVFGCGTKLTVLSGGGGSQVQLVQSGGEVKKPGASVKVSCKASGYTFTSYGISWVRQAPGQCLEWMGWISAYTGETLYAQKLQGRVTMTRDTSTSTAYMELRSLRSDDTAVYYCARDPDYYGSGSYSDYWGQGTLVTVSSGGGGSGGGGSGGGGSEIVLTQSPATLSVSPGERATLSCRASQSVSSNLAWYQQKPGQAPRLLIYGASSRATGIPARFSGSGSGTEFTLTISSLQSEDFAVYYCQQYHSWPLLTFGCGTKVEIKSGGGGSEVQLVESGGGLVQPGGSLKLSCAASGFTFNKYAMNWVRQAPGKGLEWVARIRSKYNNYATYYADSVKDRFTISRDDSKNTAYLQMNNLKTEDTAVYYCVRHGNFGNSYISYWAYWGQGTLVTVSSGGGGSGGGGSGGGGSQTVVTQEPSLTVSPGGTVTLTCGSSTGAVTSGNYPNWVQQKPGQAPRGLIGGTKFLAPGTPARFSGSLLGGKAALTLSGVQPEDEAEYYCVLWYSNRWVFGGGTKLTVLGGGGDKTHTCPPCPAPELLGGPSVFLFPPKPKDTLMISRTPEVTCVVVDVSHEDPEVKFNWYVDGVEVHNAKTKPCEEQYGSTYRCVSVLTVLHQDWLNGKEYKCKVSNKALPAPIEKTISKAKGQPREPQVYTLPPSREEMTKNQVSLTCLVKGFYPSDIAVEWESNGQPENNYKTTPPVLDSDGSFFLYSKLTVDKSRWQQGNVFSCSVMHEALHNHYTQKSLSLSPGKGGGGSGGGGSGGGGSGGGGSGGGGSGGGGSDKTHTCPPCPAPELLGGPSVFLFPPKPKDTLMISRTPEVTCVVVDVSHEDPEVKFNWYVDGVEVHNAKTKPCEEQYGSTYRCVSVLTVLHQDWLNGKEYKCKVSNKALPAPIEKTISKAKGQPREPQVYTLPPSREEMTKNQVSLTCLVKGFYPSDIAVEWESNGQPENNYKTTPPVLDSDGSFFLYSKLTVDKSRWQQGNVFSCSVMHEALHNHYTQKSLSLSPGK

SEQ ID NO: 326 - protein, 1224 aa, Artificial Sequence
  Synthetic
EVQLLESGGGLVQPGGSLRLSCAASGFTFSGHAMTWVRQAPGKCLEWLSTIYGSGGYTYYAGSVKGRFTISRDNSKNTLYLQMNSLRAEDTAVYYCAKVGGYDWYFDLWGRGTLVTVSSGGGGQGGGGQGGGGQSYELTQPPSVSVALGQTARITCGGHNIGSKNVHWYQQKPGQAPVLVIYRDTNRPSGIPERFSGSNSGNTATLTISRAQAGDEADYYCQLWDSTTVVFGCGTKLTVLSGGGGQQVQLVQSGGEVKKPGASVKVSCKASGYTFTSYGISWVRQAPGQCLEWMGWISAYTGETLYAQKLQGRVTMTRDTSTSTAYMELRSLRSDDTAVYYCARDPDYYGSGSYSDYWGQGTLVTVSSGGGGQGGGGQGGGGQEIVLTQSPATLSVSPGERATLSCRASQSVSSNLAWYQQKPGQAPRLLIYGASSRATGIPARFSGSGSGTEFTLTISSLQSEDFAVYYCQQYHSWPLLTFGCGTKVEIKSGGGGQEVQLVESGGGLVQPGGSLKLSCAASGFTFNKYAMNWVRQAPGKGLEWVARIRSKYNNYATYYADSVKDRFTISRDDSKNTAYLQMNNLKTEDTAVYYCVRHGNFGNSYISYWAYWGQGTLVTVSSGGGGQGGGGQGGGGQQTVVTQEPSLTVSPGGTVTLTCGSSTGAVTSGNYPNWVQQKPGQAPRGLIGGTKFLAPGTPARFSGSLLGGKAALTLSGVQPEDEAEYYCVLWYSNRWVFGGGTKLTVLGGGGCPPCPAPELLGGPSVFLFPPKPKDTLMISRTPEVTCVVVDVSHEEPEVKFNWYVDGVEVHNAKTKPCEEQYGSTYRCVSVLTVLHQDWLNGKEYKCKVSNKALPAPIEKTISKAKGQPREPQVYTLPPSREEMTKNQVSLTCLVKGFYPSDIAVEWESNGQPENNYKTTPPVLDSDGSFFLYSKLTVDKSRWQQGNVFSCSVMHEALHNHYTQKSLSLSPGKGGGGQGGGGQGGGGQGGGGQGGGGQGGGGQCPPCPAPELLGGPSVFLFPPKPKDTLMISRTPEVTCVVVDVSHEEPEVKFNWYVDGVEVHNAKTKPCEEQYGSTYRCVSVLTVLHQDWLNGKEYKCKVSNKALPAPIEKTISKAKGQPREPQVYTLPPSREEMTKNQVSLTCLVKGFYPSDIAVEWESNGQPENNYKTTPPVLDSDGSFFLYSKLTVDKSRWQQGNVFSCSVMHEALHNHYTQKSLSLSPGK

SEQ ID NO: 327 - protein, 1234 aa, Artificial Sequence
  Synthetic
EVQLLESGGGLVQPGGSLRLSCAASGFTFSGHAMTWVRQAPGKCLEWLSTIYGSGGYTYYAGSVKGRFTISRDNSKNTLYLQMNSLRAEDTAVYYCAKVGGYDWYFDLWGRGTLVTVSSGGGGSGGGGSGGGGSSYELTQPPSVSVALGQTARITCGGHNIGSKNVHWYQQKPGQAPVLVIYRDTNRPSGIPERFSGSNSGNTATLTISRAQAGDEADYYCQLWDSTTVVFGCGTKLTVLSGGGGSQVQLVQSGGEVKKPGASVKVSCKASGYTFTSYGISWVRQAPGQCLEWMGWISAYTGETLYAQKLQGRVTMTRDTSTSTAYMELRSLRSDDTAVYYCARDPDYYGSGSYSDYWGQGTLVTVSSGGGGSGGGGSGGGGSEIVLTQSPATLSVSPGERATLSCRASQSVSSNLAWYQQKPGQAPRLLIYGASSRATGIPARFSGSGSGTEFTLTISSLQSEDFAVYYCQQYHSWPLLTFGCGTKVEIKSGGGGSEVQLVESGGGLVQPGGSLKLSCAASGFTFNKYAINWVRQAPGKGLEWVARIRSKYNNYATYYADAVKDRFTISRDDSKNTVYLQMNNLKTEDTAVYYCARAGNFGSSYISYWAYWGQGTLVTVSSGGGGSGGGGSGGGGSQTVVTQEPSLTVSPGGTVTITCGSSTGAVTSGNYPNWVQKKPGQAPRGLIGGTKFLAPGTPARFSGSLSGGKAALTLSGVQPEDEAEYYCVLWYSNRWVFGSGTKLTVLGGGGDKTHTCPPCPAPELLGGPSVFLFPPKPKDTLMISRTPEVTCVVVDVSHEDPEVKFNWYVDGVEVHNAKTKPCEEQYGSTYRCVSVLTVLHQDWLNGKEYKCKVSNKALPAPIEKTISKAKGQPREPQVYTLPPSREEMTKNQVSLTCLVKGFYPSDIAVEWESNGQPENNYKTTPPVLDSDGSFFLYSKLTVDKSRWQQGNVFSCSVMHEALHNHYTQKSLSLSPGKGGGGSGGGGSGGGGSGGGGSGGGGSGGGGSDKTHTCPPCPAPELLGGPSVFLFPPKPKDTLMISRTPEVTCVVVDVSHEDPEVKFNWYVDGVEVHNAKTKPCEEQYGSTYRCVSVLTVLHQDWLNGKEYKCKVSNKALPAPIEKTISKAKGQPREPQVYTLPPSREEMTKNQVSLTCLVKGFYPSDIAVEWESNGQPENNYKTTPPVLDSDGSFFLYSKLTVDKSRWQQGNVFSCSVMHEALHNHYTQKSLSLSPGK

SEQ ID NO: 328 - protein, 1224 aa, Artificial Sequence
  Synthetic
EVQLLESGGGLVQPGGSLRLSCAASGFTFSGHAMTWVRQAPGKCLEWLSTIYGSGGYTYYAGSVKGRFTISRDNSKNTLYLQMNSLRAEDTAVYYCAKVGGYDWYFDLWGRGTLVTVSSGGGGQGGGGQGGGGQSYELTQPPSVSVALGQTARITCGGHNIGSKNVHWYQQKPGQAPVLVIYRDTNRPSGIPERFSGSNSGNTATLTISRAQAGDEADYYCQLWDSTTVVFGCGTKLTVLSGGGGQQVQLVQSGGEVKKPGASVKVSCKASGYTFTSYGISWVRQAPGQCLEWMGWISAYTGETLYAQKLQGRVTMTRDTSTSTAYMELRSLRSDDTAVYYCARDPDYYGSGSYSDYWGQGTLVTVSSGGGGQGGGGQGGGGQEIVLTQSPATLSVSPGERATLSCRASQSVSSNLAWYQQKPGQAPRLLIYGASSRATGIPARFSGSGSGTEFTLTISSLQSEDFAVYYCQQYHSWPLLTFGCGTKVEIKSGGGGQEVQLVESGGGLVQPGGSLKLSCAASGFTFNKYAINWVRQAPGKGLEWVARIRSKYNNYATYYADAVKDRFTISRDDSKNTVYLQMNNLKTEDTAVYYCARAGNFGSSYISYWAYWGQGTLVTVSSGGGGQGGGGQGGGGQQTVVTQEPSLTVSPGGTVTITCGSSTGAVTSGNYPNWVQKKPGQAPRGLIGGTKFLAPGTPARFSGSLSGGKAALTLSGVQPEDEAEYYCVLWYSNRWVFGSGTKLTVLGGGGCPPCPAPELLGGPSVFLFPPKPKDTLMISRTPEVTCVVVDVSHEEPEVKFNWYVDGVEVHNAKTKPCEEQYGSTYRCVSVLTVLHQDWLNGKEYKCKVSNKALPAPIEKTISKAKGQPREPQVYTLPPSREEMTKNQVSLTCLVKGFYPSDIAVEWESNGQPENNYKTTPPVLDSDGSFFLYSKLTVDKSRWQQGNVFSCSVMHEALHNHYTQKSLSLSPGKGGGGQGGGGQGGGGQGGGGQGGGGQGGGGQCPPCPAPELLGGPSVFLFPPKPKDTLMISRTPEVTCVVVDVSHEEPEVKFNWYVDGVEVHNAKTKPCEEQYGSTYRCVSVLTVLHQDWLNGKEYKCKVSNKALPAPIEKTISKAKGQPREPQVYTLPPSREEMTKNQVSLTCLVKGFYPSDIAVEWESNGQPENNYKTTPPVLDSDGSFFLYSKLTVDKSRWQQGNVFSCSVMHEALHNHYTQKSLSLSPGK

SEQ ID NO: 329 - protein, 487 aa, Artificial Sequence
  Synthetic
EVQLLESGGGLVQPGGSLRLSCAASGFTFSGHAMTWVRQAPGKCLEWLSTIYGSGGYTYYAGSVKGRFTISRDNSKNTLYLQMNSLRAEDTAVYYCAKVGGYDWYFDLWGRGTLVTVSSGGGGSGGGGSGGGGSSYELTQPPSVSVALGQTARITCGGHNIGSKNVHWYQQKPGQAPVLVIYRDTNRPSGIPERFSGSNSGNTATLTISRAQAGDEADYYCQLWDSTTVVFGCGTKLTVLSGGGGSQVQLVQSGAEVKKPGESLKISCKGSGYSFTSYGISWVRQAPGQCLEWMGWISAYNGNTIYAQKLQGRVTMTTDTSTSTAYMELRRLRSDDTAVYYCARDPGVTGDDYWGQGTLVTVSSGGGGSGGGGSGGGGSEIVLTQSPATLSVSPGERATLSCRASLSVSSNLAWYQQKPGQAPRLLIYGASTRATGIPARFSGSGSGTEFTLTISSLQSEDFAVYFCQQYHSWPALTFGCGTKVEIK

SEQ ID NO: 330 - protein, 487 aa, Artificial Sequence
  Synthetic
EVQLLESGGGLVQPGGSLRLSCAASGFTFSGHAMTWVRQAPGKCLEWLSTIYGSGGYTYYAGSVKGRFTISRDNSKNTLYLQMNSLRAEDTAVYYCAKVGGYDWYFDLWGRGTLVTVSSGGGGQGGGGQGGGGQSYELTQPPSVSVALGQTARITCGGHNIGSKNVHWYQQKPGQAPVLVIYRDTNRPSGIPERFSGSNSGNTATLTISRAQAGDEADYYCQLWDSTTVVFGCGTKLTVLSGGGGQQVQLVQSGAEVKKPGESLKISCKGSGYSFTSYGISWVRQAPGQCLEWMGWISAYNGNTIYAQKLQGRVTMTTDTSTSTAYMELRRLRSDDTAVYYCARDPGVTGDDYWGQGTLVTVSSGGGGQGGGGQGGGGQEIVLTQSPATLSVSPGERATLSCRASLSVSSNLAWYQQKPGQAPRLLIYGASTRATGIPARFSGSGSGTEFTLTISSLQSEDFAVYFCQQYHSWPALTFGCGTKVEIK

SEQ ID NO: 331 - protein, 742 aa, Artificial Sequence
  Synthetic
EVQLLESGGGLVQPGGSLRLSCAASGFTFSGHAMTWVRQAPGKCLEWLSTIYGSGGYTYYAGSVKGRFTISRDNSKNTLYLQMNSLRAEDTAVYYCAKVGGYDWYFDLWGRGTLVTVSSGGGGSGGGGSGGGGSSYELTQPPSVSVALGQTARITCGGHNIGSKNVHWYQQKPGQAPVLVIYRDTNRPSGIPERFSGSNSGNTATLTISRAQAGDEADYYCQLWDSTTVVFGCGTKLTVLSGGGGSQVQLVQSGAEVKKPGESLKISCKGSGYSFTSYGISWVRQAPGQCLEWMGWISAYNGNTIYAQKLQGRVTMTTDTSTSTAYMELRRLRSDDTAVYYCARDPGVTGDDYWGQGTLVTVSSGGGGSGGGGSGGGGSEIVLTQSPATLSVSPGERATLSCRASLSVSSNLAWYQQKPGQAPRLLIYGASTRATGIPARFSGSGSGTEFTLTISSLQSEDFAVYFCQQYHSWPALTFGCGTKVEIKSGGGGSEVQLVESGGGLVQPGGSLKLSCAASGFTFNKYAMNWVRQAPGKGLEWVARIRSKYNNYATYYADSVKDRFTISRDDSKNTAYLQMNNLKTEDTAVYYCVRHGNFGNSYISYWAYWGQGTLVTVSSGGGGSGGGGSGGGGSQTVVTQEPSLTVSPGGTVTLTCGSSTGAVTSGNYPNWVQQKPGQAPRGLIGGTKFLAPGTPARFSGSLLGGKAALTLSGVQPEDEAEYYCVLWYSNRWVFGGGTKLTVL

SEQ ID NO: 332 - protein, 742 aa, Artificial Sequence
  Synthetic
EVQLLESGGGLVQPGGSLRLSCAASGFTFSGHAMTWVRQAPGKCLEWLSTIYGSGGYTYYAGSVKGRFTISRDNSKNTLYLQMNSLRAEDTAVYYCAKVGGYDWYFDLWGRGTLVTVSSGGGGQGGGGQGGGGQSYELTQPPSVSVALGQTARITCGGHNIGSKNVHWYQQKPGQAPVLVIYRDTNRPSGIPERFSGSNSGNTATLTISRAQAGDEADYYCQLWDSTTVVFGCGTKLTVLSGGGGQQVQLVQSGAEVKKPGESLKISCKGSGYSFTSYGISWVRQAPGQCLEWMGWISAYNGNTIYAQKLQGRVTMTTDTSTSTAYMELRRLRSDDTAVYYCARDPGVTGDDYWGQGTLVTVSSGGGGQGGGGQGGGGQEIVLTQSPATLSVSPGERATLSCRASLSVSSNLAWYQQKPGQAPRLLIYGASTRATGIPARFSGSGSGTEFTLTISSLQSEDFAVYFCQQYHSWPALTFGCGTKVEIKSGGGGQEVQLVESGGGLVQPGGSLKLSCAASGFTFNKYAMNWVRQAPGKGLEWVARIRSKYNNYATYYADSVKDRFTISRDDSKNTAYLQMNNLKTEDTAVYYCVRHGNFGNSYISYWAYWGQGTLVTVSSGGGGQGGGGQGGGGQQTVVTQEPSLTVSPGGTVTLTCGSSTGAVTSGNYPNWVQQKPGQAPRGLIGGTKFLAPGTPARFSGSLLGGKAALTLSGVQPEDEAEYYCVLWYSNRWVFGGGTKLTVL

SEQ ID NO: 333 - protein, 742 aa, Artificial Sequence
  Synthetic
EVQLLESGGGLVQPGGSLRLSCAASGFTFSGHAMTWVRQAPGKCLEWLSTIYGSGGYTYYAGSVKGRFTISRDNSKNTLYLQMNSLRAEDTAVYYCAKVGGYDWYFDLWGRGTLVTVSSGGGGSGGGGSGGGGSSYELTQPPSVSVALGQTARITCGGHNIGSKNVHWYQQKPGQAPVLVIYRDTNRPSGIPERFSGSNSGNTATLTISRAQAGDEADYYCQLWDSTTVVFGCGTKLTVLSGGGGSQVQLVQSGAEVKKPGESLKISCKGSGYSFTSYGISWVRQAPGQCLEWMGWISAYNGNTIYAQKLQGRVTMTTDTSTSTAYMELRRLRSDDTAVYYCARDPGVTGDDYWGQGTLVTVSSGGGGSGGGGSGGGGSEIVLTQSPATLSVSPGERATLSCRASLSVSSNLAWYQQKPGQAPRLLIYGASTRATGIPARFSGSGSGTEFTLTISSLQSEDFAVYFCQQYHSWPALTFGCGTKVEIKSGGGGSEVQLVESGGGLVQPGGSLKLSCAASGFTFNKYAINWVRQAPGKGLEWVARIRSKYNNYATYYADAVKDRFTISRDDSKNTVYLQMNNLKTEDTAVYYCARAGNFGSSYISYWAYWGQGTLVTVSSGGGGSGGGGSGGGGSQTVVTQEPSLTVSPGGTVTITCGSSTGAVTSGNYPNWVQKKPGQAPRGLIGGTKFLAPGTPARFSGSLSGGKAALTLSGVQPEDEAEYYCVLWYSNRWVFGSGTKLTVL

SEQ ID NO: 334 - protein, 742 aa, Artificial Sequence
  Synthetic
EVQLLESGGGLVQPGGSLRLSCAASGFTFSGHAMTWVRQAPGKCLEWLSTIYGSGGYTYYAGSVKGRFTISRDNSKNTLYLQMNSLRAEDTAVYYCAKVGGYDWYFDLWGRGTLVTVSSGGGGQGGGGQGGGGQSYELTQPPSVSVALGQTARITCGGHNIGSKNVHWYQQKPGQAPVLVIYRDTNRPSGIPERFSGSNSGNTATLTISRAQAGDEADYYCQLWDSTTVVFGCGTKLTVLSGGGGQQVQLVQSGAEVKKPGESLKISCKGSGYSFTSYGISWVRQAPGQCLEWMGWISAYNGNTIYAQKLQGRVTMTTDTSTSTAYMELRRLRSDDTAVYYCARDPGVTGDDYWGQGTLVTVSSGGGGQGGGGQGGGGQEIVLTQSPATLSVSPGERATLSCRASLSVSSNLAWYQQKPGQAPRLLIYGASTRATGIPARFSGSGSGTEFTLTISSLQSEDFAVYFCQQYHSWPALTFGCGTKVEIKSGGGGQEVQLVESGGGLVQPGGSLKLSCAASGFTFNKYAINWVRQAPGKGLEWVARIRSKYNNYATYYADAVKDRFTISRDDSKNTVYLQMNNLKTEDTAVYYCARAGNFGSSYISYWAYWGQGTLVTVSSGGGGQGGGGQGGGGQQTVVTQEPSLTVSPGGTVTITCGSSTGAVTSGNYPNWVQKKPGQAPRGLIGGTKFLAPGTPARFSGSLSGGKAALTLSGVQPEDEAEYYCVLWYSNRWVFGSGTKLTVL

SEQ ID NO: 335 - protein, 1230 aa, Artificial Sequence
  Synthetic
EVQLLESGGGLVQPGGSLRLSCAASGFTFSGHAMTWVRQAPGKCLEWLSTIYGSGGYTYYAGSVKGRFTISRDNSKNTLYLQMNSLRAEDTAVYYCAKVGGYDWYFDLWGRGTLVTVSSGGGGSGGGGSGGGGSSYELTQPPSVSVALGQTARITCGGHNIGSKNVHWYQQKPGQAPVLVIYRDTNRPSGIPERFSGSNSGNTATLTISRAQAGDEADYYCQLWDSTTVVFGCGTKLTVLSGGGGSQVQLVQSGAEVKKPGESLKISCKGSGYSFTSYGISWVRQAPGQCLEWMGWISAYNGNTIYAQKLQGRVTMTTDTSTSTAYMELRRLRSDDTAVYYCARDPGVTGDDYWGQGTLVTVSSGGGGSGGGGSGGGGSEIVLTQSPATLSVSPGERATLSCRASLSVSSNLAWYQQKPGQAPRLLIYGASTRATGIPARFSGSGSGTEFTLTISSLQSEDFAVYFCQQYHSWPALTFGCGTKVEIKSGGGGSEVQLVESGGGLVQPGGSLKLSCAASGFTFNKYAMNWVRQAPGKGLEWVARIRSKYNNYATYYADSVKDRFTISRDDSKNTAYLQMNNLKTEDTAVYYCVRHGNFGNSYISYWAYWGQGTLVTVSSGGGGSGGGGSGGGGSQTVVTQEPSLTVSPGGTVTLTCGSSTGAVTSGNYPNWVQQKPGQAPRGLIGGTKFLAPGTPARFSGSLLGGKAALTLSGVQPEDEAEYYCVLWYSNRWVFGGGTKLTVLGGGGDKTHTCPPCPAPELLGGPSVFLFPPKPKDTLMISRTPEVTCVVVDVSHEDPEVKFNWYVDGVEVHNAKTKPCEEQYGSTYRCVSVLTVLHQDWLNGKEYKCKVSNKALPAPIEKTISKAKGQPREPQVYTLPPSREEMTKNQVSLTCLVKGFYPSDIAVEWESNGQPENNYKTTPPVLDSDGSFFLYSKLTVDKSRWQQGNVFSCSVMHEALHNHYTQKSLSLSPGKGGGGSGGGGSGGGGSGGGGSGGGGSGGGGSDKTHTCPPCPAPELLGGPSVFLFPPKPKDTLMISRTPEVTCVVVDVSHEDPEVKFNWYVDGVEVHNAKTKPCEEQYGSTYRCVSVLTVLHQDWLNGKEYKCKVSNKALPAPIEKTISKAKGQPREPQVYTLPPSREEMTKNQVSLTCLVKGFYPSDIAVEWESNGQPENNYKTTPPVLDSDGSFFLYSKLTVDKSRWQQGNVFSCSVMHEALHNHYTQKSLSLSPGK

SEQ ID NO: 336 - protein, 1220 aa, Artificial Sequence
  Synthetic
EVQLLESGGGLVQPGGSLRLSCAASGFTFSGHAMTWVRQAPGKCLEWLSTIYGSGGYTYYAGSVKGRFTISRDNSKNTLYLQMNSLRAEDTAVYYCAKVGGYDWYFDLWGRGTLVTVSSGGGGQGGGGQGGGGQSYELTQPPSVSVALGQTARITCGGHNIGSKNVHWYQQKPGQAPVLVIYRDTNRPSGIPERFSGSNSGNTATLTISRAQAGDEADYYCQLWDSTTVVFGCGTKLTVLSGGGGQQVQLVQSGAEVKKPGESLKISCKGSGYSFTSYGISWVRQAPGQCLEWMGWISAYNGNTIYAQKLQGRVTMTTDTSTSTAYMELRRLRSDDTAVYYCARDPGVTGDDYWGQGTLVTVSSGGGGQGGGGQGGGGQEIVLTQSPATLSVSPGERATLSCRASLSVSSNLAWYQQKPGQAPRLLIYGASTRATGIPARFSGSGSGTEFTLTISSLQSEDFAVYFCQQYHSWPALTFGCGTKVEIKSGGGGQEVQLVESGGGLVQPGGSLKLSCAASGFTFNKYAMNWVRQAPGKGLEWVARIRSKYNNYATYYADSVKDRFTISRDDSKNTAYLQMNNLKTEDTAVYYCVRHGNFGNSYISYWAYWGQGTLVTVSSGGGGQGGGGQGGGGQQTVVTQEPSLTVSPGGTVTLTCGSSTGAVTSGNYPNWVQQKPGQAPRGLIGGTKFLAPGTPARFSGSLLGGKAALTLSGVQPEDEAEYYCVLWYSNRWVFGGGTKLTVLGGGGCPPCPAPELLGGPSVFLFPPKPKDTLMISRTPEVTCVVVDVSHEEPEVKFNWYVDGVEVHNAKTKPCEEQYGSTYRCVSVLTVLHQDWLNGKEYKCKVSNKALPAPIEKTISKAKGQPREPQVYTLPPSREEMTKNQVSLTCLVKGFYPSDIAVEWESNGQPENNYKTTPPVLDSDGSFFLYSKLTVDKSRWQQGNVFSCSVMHEALHNHYTQKSLSLSPGKGGGGQGGGGQGGGGQGGGGQGGGGQGGGGQCPPCPAPELLGGPSVFLFPPKPKDTLMISRTPEVTCVVVDVSHEEPEVKFNWYVDGVEVHNAKTKPCEEQYGSTYRCVSVLTVLHQDWLNGKEYKCKVSNKALPAPIEKTISKAKGQPREPQVYTLPPSREEMTKNQVSLTCLVKGFYPSDIAVEWESNGQPENNYKTTPPVLDSDGSFFLYSKLTVDKSRWQQGNVFSCSVMHEALHNHYTQKSLSLSPGK

SEQ ID NO: 337 - protein, 1230 aa, Artificial Sequence
  Synthetic
EVQLLESGGGLVQPGGSLRLSCAASGFTFSGHAMTWVRQAPGKCLEWLSTIYGSGGYTYYAGSVKGRFTISRDNSKNTLYLQMNSLRAEDTAVYYCAKVGGYDWYFDLWGRGTLVTVSSGGGGSGGGGSGGGGSSYELTQPPSVSVALGQTARITCGGHNIGSKNVHWYQQKPGQAPVLVIYRDTNRPSGIPERFSGSNSGNTATLTISRAQAGDEADYYCQLWDSTTVVFGCGTKLTVLSGGGGSQVQLVQSGAEVKKPGESLKISCKGSGYSFTSYGISWVRQAPGQCLEWMGWISAYNGNTIYAQKLQGRVTMTTDTSTSTAYMELRRLRSDDTAVYYCARDPGVTGDDYWGQGTLVTVSSGGGGSGGGGSGGGGSEIVLTQSPATLSVSPGERATLSCRASLSVSSNLAWYQQKPGQAPRLLIYGASTRATGIPARFSGSGSGTEFTLTISSLQSEDFAVYFCQQYHSWPALTFGCGTKVEIKSGGGGSEVQLVESGGGLVQPGGSLKLSCAASGFTFNKYAINWVRQAPGKGLEWVARIRSKYNNYATYYADAVKDRFTISRDDSKNTVYLQMNNLKTEDTAVYYCARAGNFGSSYISYWAYWGQGTLVTVSSGGGGSGGGGSGGGGSQTVVTQEPSLTVSPGGTVTITCGSSTGAVTSGNYPNWVQKKPGQAPRGLIGGTKFLAPGTPARFSGSLSGGKAALTLSGVQPEDEAEYYCVLWYSNRWVFGSGTKLTVLGGGGDKTHTCPPCPAPELLGGPSVFLFPPKPKDTLMISRTPEVTCVVVDVSHEDPEVKFNWYVDGVEVHNAKTKPCEEQYGSTYRCVSVLTVLHQDWLNGKEYKCKVSNKALPAPIEKTISKAKGQPREPQVYTLPPSREEMTKNQVSLTCLVKGFYPSDIAVEWESNGQPENNYKTTPPVLDSDGSFFLYSKLTVDKSRWQQGNVFSCSVMHEALHNHYTQKSLSLSPGKGGGGSGGGGSGGGGSGGGGSGGGGSGGGGSDKTHTCPPCPAPELLGGPSVFLFPPKPKDTLMISRTPEVTCVVVDVSHEDPEVKFNWYVDGVEVHNAKTKPCEEQYGSTYRCVSVLTVLHQDWLNGKEYKCKVSNKALPAPIEKTISKAKGQPREPQVYTLPPSREEMTKNQVSLTCLVKGFYPSDIAVEWESNGQPENNYKTTPPVLDSDGSFFLYSKLTVDKSRWQQGNVFSCSVMHEALHNHYTQKSLSLSPGK

SEQ ID NO: 338 - protein, 1220 aa, Artificial Sequence
  Synthetic
EVQLLESGGGLVQPGGSLRLSCAASGFTFSGHAMTWVRQAPGKCLEWLSTIYGSGGYTYYAGSVKGRFTISRDNSKNTLYLQMNSLRAEDTAVYYCAKVGGYDWYFDLWGRGTLVTVSSGGGGQGGGGQGGGGQSYELTQPPSVSVALGQTARITCGGHNIGSKNVHWYQQKPGQAPVLVIYRDTNRPSGIPERFSGSNSGNTATLTISRAQAGDEADYYCQLWDSTTVVFGCGTKLTVLSGGGGQQVQLVQSGAEVKKPGESLKISCKGSGYSFTSYGISWVRQAPGQCLEWMGWISAYNGNTIYAQKLQGRVTMTTDTSTSTAYMELRRLRSDDTAVYYCARDPGVTGDDYWGQGTLVTVSSGGGGQGGGGQGGGGQEIVLTQSPATLSVSPGERATLSCRASLSVSSNLAWYQQKPGQAPRLLIYGASTRATGIPARFSGSGSGTEFTLTISSLQSEDFAVYFCQQYHSWPALTFGCGTKVEIKSGGGGQEVQLVESGGGLVQPGGSLKLSCAASGFTFNKYAINWVRQAPGKGLEWVARIRSKYNNYATYYADAVKDRFTISRDDSKNTVYLQMNNLKTEDTAVYYCARAGNFGSSYISYWAYWGQGTLVTVSSGGGGQGGGGQGGGGQQTVVTQEPSLTVSPGGTVTITCGSSTGAVTSGNYPNWVQKKPGQAPRGLIGGTKFLAPGTPARFSGSLSGGKAALTLSGVQPEDEAEYYCVLWYSNRWVFGSGTKLTVLGGGGCPPCPAPELLGGPSVFLFPPKPKDTLMISRTPEVTCVVVDVSHEEPEVKFNWYVDGVEVHNAKTKPCEEQYGSTYRCVSVLTVLHQDWLNGKEYKCKVSNKALPAPIEKTISKAKGQPREPQVYTLPPSREEMTKNQVSLTCLVKGFYPSDIAVEWESNGQPENNYKTTPPVLDSDGSFFLYSKLTVDKSRWQQGNVFSCSVMHEALHNHYTQKSLSLSPGKGGGGQGGGGQGGGGQGGGGQGGGGQGGGGQCPPCPAPELLGGPSVFLFPPKPKDTLMISRTPEVTCVVVDVSHEEPEVKFNWYVDGVEVHNAKTKPCEEQYGSTYRCVSVLTVLHQDWLNGKEYKCKVSNKALPAPIEKTISKAKGQPREPQVYTLPPSREEMTKNQVSLTCLVKGFYPSDIAVEWESNGQPENNYKTTPPVLDSDGSFFLYSKLTVDKSRWQQGNVFSCSVMHEALHNHYTQKSLSLSPGK

SEQ ID NO: 339 - protein, 499 aa, Artificial Sequence
  Synthetic
EVQLVESGGGLVQPGGSLTLSCAASGFTFHDYTMHWVRQTPGKCLEWLSGIGWNGYSKGYADSVKGRFTISRDNAKNSLFLQMNSLTSDDTALYYCVKDYHYGSGILDNYYGLDVWGQGTTVTVSSGGGGSGGGGSGGGGSEIVLTQSPATLSVSPGERATLSCRASQSISNNLAWYQQKPGQAPRLLIYGASSRATGIPDRFSGSGSGTEFTLTISSLQSEDFAVYYCQQYKNWPLTFGCGTKVDIKSGGGGSQVQLVQSGGEVKKPGASVKVSCKASGYTFTSYGISWVRQAPGQCLEWMGWISPQTGNAIYAQKLQGRVTMTRDTSTSTAYMELRSLRSDDTAVYYCARDPDYYGSGSYSDYWGQGTLVTVSSGGGGSGGGGSGGGGSEIVLTQSPATLSVSPGERATLSCRASQSVSSNLAWYQQKPGQAPRLLIYGASSRATGIPARFSGSGSGTEFTLTISSLQSEDFAVYYCQQYHSWPLLTFGCGTKVEIK

SEQ ID NO: 340 - protein, 499 aa, Artificial Sequence
  Synthetic
EVQLVESGGGLVQPGGSLTLSCAASGFTFHDYTMHWVRQTPGKCLEWLSGIGWNGYSKGYADSVKGRFTISRDNAKNSLFLQMNSLTSDDTALYYCVKDYHYGSGILDNYYGLDVWGQGTTVTVSSGGGGQGGGGQGGGGQEIVLTQSPATLSVSPGERATLSCRASQSISNNLAWYQQKPGQAPRLLIYGASSRATGIPDRFSGSGSGTEFTLTISSLQSEDFAVYYCQQYKNWPLTFGCGTKVDIKSGGGGQQVQLVQSGGEVKKPGASVKVSCKASGYTFTSYGISWVRQAPGQCLEWMGWISPQTGNAIYAQKLQGRVTMTRDTSTSTAYMELRSLRSDDTAVYYCARDPDYYGSGSYSDYWGQGTLVTVSSGGGGQGGGGQGGGGQEIVLTQSPATLSVSPGERATLSCRASQSVSSNLAWYQQKPGQAPRLLIYGASSRATGIPARFSGSGSGTEFTLTISSLQSEDFAVYYCQQYHSWPLLTFGCGTKVEIK

SEQ ID NO: 341 - protein, 754 aa, Artificial Sequence
  Synthetic
EVQLVESGGGLVQPGGSLTLSCAASGFTFHDYTMHWVRQTPGKCLEWLSGIGWNGYSKGYADSVKGRFTISRDNAKNSLFLQMNSLTSDDTALYYCVKDYHYGSGILDNYYGLDVWGQGTTVTVSSGGGGSGGGGSGGGGSEIVLTQSPATLSVSPGERATLSCRASQSISNNLAWYQQKPGQAPRLLIYGASSRATGIPDRFSGSGSGTEFTLTISSLQSEDFAVYYCQQYKNWPLTFGCGTKVDIKSGGGGSQVQLVQSGGEVKKPGASVKVSCKASGYTFTSYGISWVRQAPGQCLEWMGWISPQTGNAIYAQKLQGRVTMTRDTSTSTAYMELRSLRSDDTAVYYCARDPDYYGSGSYSDYWGQGTLVTVSSGGGGSGGGGSGGGGSEIVLTQSPATLSVSPGERATLSCRASQSVSSNLAWYQQKPGQAPRLLIYGASSRATGIPARFSGSGSGTEFTLTISSLQSEDFAVYYCQQYHSWPLLTFGCGTKVEIKSGGGGSEVQLVESGGGLVQPGGSLKLSCAASGFTFNKYAMNWVRQAPGKGLEWVARIRSKYNNYATYYADSVKDRFTISRDDSKNTAYLQMNNLKTEDTAVYYCVRHGNFGNSYISYWAYWGQGTLVTVSSGGGGSGGGGSGGGGSQTVVTQEPSLTVSPGGTVTLTCGSSTGAVTSGNYPNWVQQKPGQAPRGLIGGTKFLAPGTPARFSGSLLGGKAALTLSGVQPEDEAEYYCVLWYSNRWVFGGGTKLTVL

SEQ ID NO: 342 - protein, 754 aa, Artificial Sequence
  Synthetic
EVQLVESGGGLVQPGGSLTLSCAASGFTFHDYTMHWVRQTPGKCLEWLSGIGWNGYSKGYADSVKGRFTISRDNAKNSLFLQMNSLTSDDTALYYCVKDYHYGSGILDNYYGLDVWGQGTTVTVSSGGGGQGGGGQGGGGQEIVLTQSPATLSVSPGERATLSCRASQSISNNLAWYQQKPGQAPRLLIYGASSRATGIPDRFSGSGSGTEFTLTISSLQSEDFAVYYCQQYKNWPLTFGCGTKVDIKSGGGGQQVQLVQSGGEVKKPGASVKVSCKASGYTFTSYGISWVRQAPGQCLEWMGWISPQTGNAIYAQKLQGRVTMTRDTSTSTAYMELRSLRSDDTAVYYCARDPDYYGSGSYSDYWGQGTLVTVSSGGGGQGGGGQGGGGQEIVLTQSPATLSVSPGERATLSCRASQSVSSNLAWYQQKPGQAPRLLIYGASSRATGIPARFSGSGSGTEFTLTISSLQSEDFAVYYCQQYHSWPLLTFGCGTKVEIKSGGGGQEVQLVESGGGLVQPGGSLKLSCAASGFTFNKYAMNWVRQAPGKGLEWVARIRSKYNNYATYYADSVKDRFTISRDDSKNTAYLQMNNLKTEDTAVYYCVRHGNFGNSYISYWAYWGQGTLVTVSSGGGGQGGGGQGGGGQQTVVTQEPSLTVSPGGTVTLTCGSSTGAVTSGNYPNWVQQKPGQAPRGLIGGTKFLAPGTPARFSGSLLGGKAALTLSGVQPEDEAEYYCVLWYSNRWVFGGGTKLTVL

SEQ ID NO: 343 - protein, 754 aa, Artificial Sequence
  Synthetic
EVQLVESGGGLVQPGGSLTLSCAASGFTFHDYTMHWVRQTPGKCLEWLSGIGWNGYSKGYADSVKGRFTISRDNAKNSLFLQMNSLTSDDTALYYCVKDYHYGSGILDNYYGLDVWGQGTTVTVSSGGGGSGGGGSGGGGSEIVLTQSPATLSVSPGERATLSCRASQSISNNLAWYQQKPGQAPRLLIYGASSRATGIPDRFSGSGSGTEFTLTISSLQSEDFAVYYCQQYKNWPLTFGCGTKVDIKSGGGGSQVQLVQSGGEVKKPGASVKVSCKASGYTFTSYGISWVRQAPGQCLEWMGWISPQTGNAIYAQKLQGRVTMTRDTSTSTAYMELRSLRSDDTAVYYCARDPDYYGSGSYSDYWGQGTLVTVSSGGGGSGGGGSGGGGSEIVLTQSPATLSVSPGERATLSCRASQSVSSNLAWYQQKPGQAPRLLIYGASSRATGIPARFSGSGSGTEFTLTISSLQSEDFAVYYCQQYHSWPLLTFGCGTKVEIKSGGGGSEVQLVESGGGLVQPGGSLKLSCAASGFTFNKYAINWVRQAPGKGLEWVARIRSKYNNYATYYADAVKDRFTISRDDSKNTVYLQMNNLKTEDTAVYYCARAGNFGSSYISYWAYWGQGTLVTVSSGGGGSGGGGSGGGGSQTVVTQEPSLTVSPGGTVTITCGSSTGAVTSGNYPNWVQKKPGQAPRGLIGGTKFLAPGTPARFSGSLSGGKAALTLSGVQPEDEAEYYCVLWYSNRWVFGSGTKLTVL

SEQ ID NO: 344 - protein, 754 aa, Artificial Sequence
  Synthetic
EVQLVESGGGLVQPGGSLTLSCAASGFTFHDYTMHWVRQTPGKCLEWLSGIGWNGYSKGYADSVKGRFTISRDNAKNSLFLQMNSLTSDDTALYYCVKDYHYGSGILDNYYGLDVWGQGTTVTVSSGGGGQGGGGQGGGGQEIVLTQSPATLSVSPGERATLSCRASQSISNNLAWYQQKPGQAPRLLIYGASSRATGIPDRFSGSGSGTEFTLTISSLQSEDFAVYYCQQYKNWPLTFGCGTKVDIKSGGGGQQVQLVQSGGEVKKPGASVKVSCKASGYTFTSYGISWVRQAPGQCLEWMGWISPQTGNAIYAQKLQGRVTMTRDTSTSTAYMELRSLRSDDTAVYYCARDPDYYGSGSYSDYWGQGTLVTVSSGGGGQGGGGQGGGGQEIVLTQSPATLSVSPGERATLSCRASQSVSSNLAWYQQKPGQAPRLLIYGASSRATGIPARFSGSGSGTEFTLTISSLQSEDFAVYYCQQYHSWPLLTFGCGTKVEIKSGGGGQEVQLVESGGGLVQPGGSLKLSCAASGFTFNKYAINWVRQAPGKGLEWVARIRSKYNNYATYYADAVKDRFTISRDDSKNTVYLQMNNLKTEDTAVYYCARAGNFGSSYISYWAYWGQGTLVTVSSGGGGQGGGGQGGGGQQTVVTQEPSLTVSPGGTVTITCGSSTGAVTSGNYPNWVQKKPGQAPRGLIGGTKFLAPGTPARFSGSLSGGKAALTLSGVQPEDEAEYYCVLWYSNRWVFGSGTKLTVL

SEQ ID NO: 345 - protein, 1242 aa, Artificial Sequence
  Synthetic
EVQLVESGGGLVQPGGSLTLSCAASGFTFHDYTMHWVRQTPGKCLEWLSGIGWNGYSKGYADSVKGRFTISRDNAKNSLFLQMNSLTSDDTALYYCVKDYHYGSGILDNYYGLDVWGQGTTVTVSSGGGGSGGGGSGGGGSEIVLTQSPATLSVSPGERATLSCRASQSISNNLAWYQQKPGQAPRLLIYGASSRATGIPDRFSGSGSGTEFTLTISSLQSEDFAVYYCQQYKNWPLTFGCGTKVDIKSGGGGSQVQLVQSGGEVKKPGASVKVSCKASGYTFTSYGISWVRQAPGQCLEWMGWISPQTGNAIYAQKLQGRVTMTRDTSTSTAYMELRSLRSDDTAVYYCARDPDYYGSGSYSDYWGQGTLVTVSSGGGGSGGGGSGGGGSEIVLTQSPATLSVSPGERATLSCRASQSVSSNLAWYQQKPGQAPRLLIYGASSRATGIPARFSGSGSGTEFTLTISSLQSEDFAVYYCQQYHSWPLLTFGCGTKVEIKSGGGGSEVQLVESGGGLVQPGGSLKLSCAASGFTFNKYAMNWVRQAPGKGLEWVARIRSKYNNYATYYADSVKDRFTISRDDSKNTAYLQMNNLKTEDTAVYYCVRHGNFGNSYISYWAYWGQGTLVTVSSGGGGSGGGGSGGGGSQTVVTQEPSLTVSPGGTVTLTCGSSTGAVTSGNYPNWVQQKPGQAPRGLIGGTKFLAPGTPARFSGSLLGGKAALTLSGVQPEDEAEYYCVLWYSNRWVFGGGTKLTVLGGGGDKTHTCPPCPAPELLGGPSVFLFPPKPKDTLMISRTPEVTCVVVDVSHEDPEVKFNWYVDGVEVHNAKTKPCEEQYGSTYRCVSVLTVLHQDWLNGKEYKCKVSNKALPAPIEKTISKAKGQPREPQVYTLPPSREEMTKNQVSLTCLVKGFYPSDIAVEWESNGQPENNYKTTPPVLDSDGSFFLYSKLTVDKSRWQQGNVFSCSVMHEALHNHYTQKSLSLSPGKGGGGSGGGGSGGGGSGGGGSGGGGSGGGGSDKTHTCPPCPAPELLGGPSVFLFPPKPKDTLMISRTPEVTCVVVDVSHEDPEVKFNWYVDGVEVHNAKTKPCEEQYGSTYRCVSVLTVLHQDWLNGKEYKCKVSNKALPAPIEKTISKAKGQPREPQVYTLPPSREEMTKNQVSLTCLVKGFYPSDIAVEWESNGQPENNYKTTPPVLDSDGSFFLYSKLTVDKSRWQQGNVFSCSVMHEALHNHYTQKSLSLSPGK

SEQ ID NO: 346 - protein, 1232 aa, Artificial Sequence
  Synthetic
EVQLVESGGGLVQPGGSLTLSCAASGFTFHDYTMHWVRQTPGKCLEWLSGIGWNGYSKGYADSVKGRFTISRDNAKNSLFLQMNSLTSDDTALYYCVKDYHYGSGILDNYYGLDVWGQGTTVTVSSGGGGQGGGGQGGGGQEIVLTQSPATLSVSPGERATLSCRASQSISNNLAWYQQKPGQAPRLLIYGASSRATGIPDRFSGSGSGTEFTLTISSLQSEDFAVYYCQQYKNWPLTFGCGTKVDIKSGGGGQQVQLVQSGGEVKKPGASVKVSCKASGYTFTSYGISWVRQAPGQCLEWMGWISPQTGNAIYAQKLQGRVTMTRDTSTSTAYMELRSLRSDDTAVYYCARDPDYYGSGSYSDYWGQGTLVTVSSGGGGQGGGGQGGGGQEIVLTQSPATLSVSPGERATLSCRASQSVSSNLAWYQQKPGQAPRLLIYGASSRATGIPARFSGSGSGTEFTLTISSLQSEDFAVYYCQQYHSWPLLTFGCGTKVEIKSGGGGQEVQLVESGGGLVQPGGSLKLSCAASGFTFNKYAMNWVRQAPGKGLEWVARIRSKYNNYATYYADSVKDRFTISRDDSKNTAYLQMNNLKTEDTAVYYCVRHGNFGNSYISYWAYWGQGTLVTVSSGGGGQGGGGQGGGGQQTVVTQEPSLTVSPGGTVTLTCGSSTGAVTSGNYPNWVQQKPGQAPRGLIGGTKFLAPGTPARFSGSLLGGKAALTLSGVQPEDEAEYYCVLWYSNRWVFGGGTKLTVLGGGGCPPCPAPELLGGPSVFLFPPKPKDTLMISRTPEVTCVVVDVSHEEPEVKFNWYVDGVEVHNAKTKPCEEQYGSTYRCVSVLTVLHQDWLNGKEYKCKVSNKALPAPIEKTISKAKGQPREPQVYTLPPSREEMTKNQVSLTCLVKGFYPSDIAVEWESNGQPENNYKTTPPVLDSDGSFFLYSKLTVDKSRWQQGNVFSCSVMHEALHNHYTQKSLSLSPGKGGGGQGGGGQGGGGQGGGGQGGGGQGGGGQCPPCPAPELLGGPSVFLFPPKPKDTLMISRTPEVTCVVVDVSHEEPEVKFNWYVDGVEVHNAKTKPCEEQYGSTYRCVSVLTVLHQDWLNGKEYKCKVSNKALPAPIEKTISKAKGQPREPQVYTLPPSREEMTKNQVSLTCLVKGFYPSDIAVEWESNGQPENNYKTTPPVLDSDGSFFLYSKLTVDKSRWQQGNVFSCSVMHEALHNHYTQKSLSLSPGK

SEQ ID NO: 347 - protein, 1242 aa, Artificial Sequence
  Synthetic
EVQLVESGGGLVQPGGSLTLSCAASGFTFHDYTMHWVRQTPGKCLEWLSGIGWNGYSKGYADSVKGRFTISRDNAKNSLFLQMNSLTSDDTALYYCVKDYHYGSGILDNYYGLDVWGQGTTVTVSSGGGGSGGGGSGGGGSEIVLTQSPATLSVSPGERATLSCRASQSISNNLAWYQQKPGQAPRLLIYGASSRATGIPDRFSGSGSGTEFTLTISSLQSEDFAVYYCQQYKNWPLTFGCGTKVDIKSGGGGSQVQLVQSGGEVKKPGASVKVSCKASGYTFTSYGISWVRQAPGQCLEWMGWISPQTGNAIYAQKLQGRVTMTRDTSTSTAYMELRSLRSDDTAVYYCARDPDYYGSGSYSDYWGQGTLVTVSSGGGGSGGGGSGGGGSEIVLTQSPATLSVSPGERATLSCRASQSVSSNLAWYQQKPGQAPRLLIYGASSRATGIPARFSGSGSGTEFTLTISSLQSEDFAVYYCQQYHSWPLLTFGCGTKVEIKSGGGGSEVQLVESGGGLVQPGGSLKLSCAASGFTFNKYAINWVRQAPGKGLEWVARIRSKYNNYATYYADAVKDRFTISRDDSKNTVYLQMNNLKTEDTAVYYCARAGNFGSSYISYWAYWGQGTLVTVSSGGGGSGGGGSGGGGSQTVVTQEPSLTVSPGGTVTITCGSSTGAVTSGNYPNWVQKKPGQAPRGLIGGTKFLAPGTPARFSGSLSGGKAALTLSGVQPEDEAEYYCVLWYSNRWVFGSGTKLTVLGGGGDKTHTCPPCPAPELLGGPSVFLFPPKPKDTLMISRTPEVTCVVVDVSHEDPEVKFNWYVDGVEVHNAKTKPCEEQYGSTYRCVSVLTVLHQDWLNGKEYKCKVSNKALPAPIEKTISKAKGQPREPQVYTLPPSREEMTKNQVSLTCLVKGFYPSDIAVEWESNGQPENNYKTTPPVLDSDGSFFLYSKLTVDKSRWQQGNVFSCSVMHEALHNHYTQKSLSLSPGKGGGGSGGGGSGGGGSGGGGSGGGGSGGGGSDKTHTCPPCPAPELLGGPSVFLFPPKPKDTLMISRTPEVTCVVVDVSHEDPEVKFNWYVDGVEVHNAKTKPCEEQYGSTYRCVSVLTVLHQDWLNGKEYKCKVSNKALPAPIEKTISKAKGQPREPQVYTLPPSREEMTKNQVSLTCLVKGFYPSDIAVEWESNGQPENNYKTTPPVLDSDGSFFLYSKLTVDKSRWQQGNVFSCSVMHEALHNHYTQKSLSLSPGK

SEQ ID NO: 348 - protein, 1232 aa, Artificial Sequence
  Synthetic
EVQLVESGGGLVQPGGSLTLSCAASGFTFHDYTMHWVRQTPGKCLEWLSGIGWNGYSKGYADSVKGRFTISRDNAKNSLFLQMNSLTSDDTALYYCVKDYHYGSGILDNYYGLDVWGQGTTVTVSSGGGGQGGGGQGGGGQEIVLTQSPATLSVSPGERATLSCRASQSISNNLAWYQQKPGQAPRLLIYGASSRATGIPDRFSGSGSGTEFTLTISSLQSEDFAVYYCQQYKNWPLTFGCGTKVDIKSGGGGQQVQLVQSGGEVKKPGASVKVSCKASGYTFTSYGISWVRQAPGQCLEWMGWISPQTGNAIYAQKLQGRVTMTRDTSTSTAYMELRSLRSDDTAVYYCARDPDYYGSGSYSDYWGQGTLVTVSSGGGGQGGGGQGGGGQEIVLTQSPATLSVSPGERATLSCRASQSVSSNLAWYQQKPGQAPRLLIYGASSRATGIPARFSGSGSGTEFTLTISSLQSEDFAVYYCQQYHSWPLLTFGCGTKVEIKSGGGGQEVQLVESGGGLVQPGGSLKLSCAASGFTFNKYAINWVRQAPGKGLEWVARIRSKYNNYATYYADAVKDRFTISRDDSKNTVYLQMNNLKTEDTAVYYCARAGNFGSSYISYWAYWGQGTLVTVSSGGGGQGGGGQGGGGQQTVVTQEPSLTVSPGGTVTITCGSSTGAVTSGNYPNWVQKKPGQAPRGLIGGTKFLAPGTPARFSGSLSGGKAALTLSGVQPEDEAEYYCVLWYSNRWVFGSGTKLTVLGGGGCPPCPAPELLGGPSVFLFPPKPKDTLMISRTPEVTCVVVDVSHEEPEVKFNWYVDGVEVHNAKTKPCEEQYGSTYRCVSVLTVLHQDWLNGKEYKCKVSNKALPAPIEKTISKAKGQPREPQVYTLPPSREEMTKNQVSLTCLVKGFYPSDIAVEWESNGQPENNYKTTPPVLDSDGSFFLYSKLTVDKSRWQQGNVFSCSVMHEALHNHYTQKSLSLSPGKGGGGQGGGGQGGGGQGGGGQGGGGQGGGGQCPPCPAPELLGGPSVFLFPPKPKDTLMISRTPEVTCVVVDVSHEEPEVKFNWYVDGVEVHNAKTKPCEEQYGSTYRCVSVLTVLHQDWLNGKEYKCKVSNKALPAPIEKTISKAKGQPREPQVYTLPPSREEMTKNQVSLTCLVKGFYPSDIAVEWESNGQPENNYKTTPPVLDSDGSFFLYSKLTVDKSRWQQGNVFSCSVMHEALHNHYTQKSLSLSPGK

SEQ ID NO: 349 - protein, 498 aa, Artificial Sequence
  Synthetic
EVQLVESGGGLVQPGRSLRLSCAASGFTFHDYTMHWVRQAPGKCLEWVSGISWNTGTIGYADSVKGRFTISRDNAKNSLYLQMNSLRAEDTALYYCVKDAFYGGDYYYNYGMDVWGHGTTVTVSSGGGGSGGGGSGGGGSEIVLTQSPATLSVSPGERATLSCRASQSVNNNLAWYQQKPGQAPRLLIYGASTRATGIPARFSGSGSGTDFTLTISSLQSDDFAVYYCQQYNNWPLTFGCGTKVEIKSGGGGSQVQLVQSGGEVKKPGASVKVSCKASGYTFTSYGISWVRQAPGQCLEWMGWISPQTGNAIYAQKLQGRVTMTRDTSTSTAYMELRSLRSDDTAVYYCARDPDYYGSGSYSDYWGQGTLVTVSSGGGGSGGGGSGGGGSEIVLTQSPATLSVSPGERATLSCRASQSVSSNLAWYQQKPGQAPRLLIYGASSRATGIPARFSGSGSGTEFTLTISSLQSEDFAVYYCQQYHSWPLLTFGCGTKVEIK

SEQ ID NO: 350 - protein, 498 aa, Artificial Sequence
  Synthetic
EVQLVESGGGLVQPGRSLRLSCAASGFTFHDYTMHWVRQAPGKCLEWVSGISWNTGTIGYADSVKGRFTISRDNAKNSLYLQMNSLRAEDTALYYCVKDAFYGGDYYYNYGMDVWGHGTTVTVSSGGGGQGGGGQGGGGQEIVLTQSPATLSVSPGERATLSCRASQSVNNNLAWYQQKPGQAPRLLIYGASTRATGIPARFSGSGSGTDFTLTISSLQSDDFAVYYCQQYNNWPLTFGCGTKVEIKSGGGGQQVQLVQSGGEVKKPGASVKVSCKASGYTFTSYGISWVRQAPGQCLEWMGWISPQTGNAIYAQKLQGRVTMTRDTSTSTAYMELRSLRSDDTAVYYCARDPDYYGSGSYSDYWGQGTLVTVSSGGGGQGGGGQGGGGQEIVLTQSPATLSVSPGERATLSCRASQSVSSNLAWYQQKPGQAPRLLIYGASSRATGIPARFSGSGSGTEFTLTISSLQSEDFAVYYCQQYHSWPLLTFGCGTKVEIK

SEQ ID NO: 351 - protein, 753 aa, Artificial Sequence
  Synthetic
EVQLVESGGGLVQPGRSLRLSCAASGFTFHDYTMHWVRQAPGKCLEWVSGISWNTGTIGYADSVKGRFTISRDNAKNSLYLQMNSLRAEDTALYYCVKDAFYGGDYYYNYGMDVWGHGTTVTVSSGGGGSGGGGSGGGGSEIVLTQSPATLSVSPGERATLSCRASQSVNNNLAWYQQKPGQAPRLLIYGASTRATGIPARFSGSGSGTDFTLTISSLQSDDFAVYYCQQYNNWPLTFGCGTKVEIKSGGGGSQVQLVQSGGEVKKPGASVKVSCKASGYTFTSYGISWVRQAPGQCLEWMGWISPQTGNAIYAQKLQGRVTMTRDTSTSTAYMELRSLRSDDTAVYYCARDPDYYGSGSYSDYWGQGTLVTVSSGGGGSGGGGSGGGGSEIVLTQSPATLSVSPGERATLSCRASQSVSSNLAWYQQKPGQAPRLLIYGASSRATGIPARFSGSGSGTEFTLTISSLQSEDFAVYYCQQYHSWPLLTFGCGTKVEIKSGGGGSEVQLVESGGGLVQPGGSLKLSCAASGFTFNKYAMNWVRQAPGKGLEWVARIRSKYNNYATYYADSVKDRFTISRDDSKNTAYLQMNNLKTEDTAVYYCVRHGNFGNSYISYWAYWGQGTLVTVSSGGGGSGGGGSGGGGSQTVVTQEPSLTVSPGGTVTLTCGSSTGAVTSGNYPNWVQQKPGQAPRGLIGGTKFLAPGTPARFSGSLLGGKAALTLSGVQPEDEAEYYCVLWYSNRWVFGGGTKLTVL

SEQ ID NO: 352 - protein, 753 aa, Artificial Sequence
  Synthetic
EVQLVESGGGLVQPGRSLRLSCAASGFTFHDYTMHWVRQAPGKCLEWVSGISWNTGTIGYADSVKGRFTISRDNAKNSLYLQMNSLRAEDTALYYCVKDAFYGGDYYYNYGMDVWGHGTTVTVSSGGGGQGGGGQGGGGQEIVLTQSPATLSVSPGERATLSCRASQSVNNNLAWYQQKPGQAPRLLIYGASTRATGIPARFSGSGSGTDFTLTISSLQSDDFAVYYCQQYNNWPLTFGCGTKVEIKSGGGGQQVQLVQSGGEVKKPGASVKVSCKASGYTFTSYGISWVRQAPGQCLEWMGWISPQTGNAIYAQKLQGRVTMTRDTSTSTAYMELRSLRSDDTAVYYCARDPDYYGSGSYSDYWGQGTLVTVSSGGGGQGGGGQGGGGQEIVLTQSPATLSVSPGERATLSCRASQSVSSNLAWYQQKPGQAPRLLIYGASSRATGIPARFSGSGSGTEFTLTISSLQSEDFAVYYCQQYHSWPLLTFGCGTKVEIKSGGGGQEVQLVESGGGLVQPGGSLKLSCAASGFTFNKYAMNWVRQAPGKGLEWVARIRSKYNNYATYYADSVKDRFTISRDDSKNTAYLQMNNLKTEDTAVYYCVRHGNFGNSYISYWAYWGQGTLVTVSSGGGGQGGGGQGGGGQQTVVTQEPSLTVSPGGTVTLTCGSSTGAVTSGNYPNWVQQKPGQAPRGLIGGTKFLAPGTPARFSGSLLGGKAALTLSGVQPEDEAEYYCVLWYSNRWVFGGGTKLTVL

SEQ ID NO: 353 - protein, 753 aa, Artificial Sequence
  Synthetic
EVQLVESGGGLVQPGRSLRLSCAASGFTFHDYTMHWVRQAPGKCLEWVSGISWNTGTIGYADSVKGRFTISRDNAKNSLYLQMNSLRAEDTALYYCVKDAFYGGDYYYNYGMDVWGHGTTVTVSSGGGGSGGGGSGGGGSEIVLTQSPATLSVSPGERATLSCRASQSVNNNLAWYQQKPGQAPRLLIYGASTRATGIPARFSGSGSGTDFTLTISSLQSDDFAVYYCQQYNNWPLTFGCGTKVEIKSGGGGSQVQLVQSGGEVKKPGASVKVSCKASGYTFTSYGISWVRQAPGQCLEWMGWISPQTGNAIYAQKLQGRVTMTRDTSTSTAYMELRSLRSDDTAVYYCARDPDYYGSGSYSDYWGQGTLVTVSSGGGGSGGGGSGGGGSEIVLTQSPATLSVSPGERATLSCRASQSVSSNLAWYQQKPGQAPRLLIYGASSRATGIPARFSGSGSGTEFTLTISSLQSEDFAVYYCQQYHSWPLLTFGCGTKVEIKSGGGGSEVQLVESGGGLVQPGGSLKLSCAASGFTFNKYAINWVRQAPGKGLEWVARIRSKYNNYATYYADAVKDRFTISRDDSKNTVYLQMNNLKTEDTAVYYCARAGNFGSSYISYWAYWGQGTLVTVSSGGGGSGGGGSGGGGSQTVVTQEPSLTVSPGGTVTITCGSSTGAVTSGNYPNWVQKKPGQAPRGLIGGTKFLAPGTPARFSGSLSGGKAALTLSGVQPEDEAEYYCVLWYSNRWVFGSGTKLTVL

SEQ ID NO: 354 - protein, 753 aa, Artificial Sequence
  Synthetic
EVQLVESGGGLVQPGRSLRLSCAASGFTFHDYTMHWVRQAPGKCLEWVSGISWNTGTIGYADSVKGRFTISRDNAKNSLYLQMNSLRAEDTALYYCVKDAFYGGDYYYNYGMDVWGHGTTVTVSSGGGGQGGGGQGGGGQEIVLTQSPATLSVSPGERATLSCRASQSVNNNLAWYQQKPGQAPRLLIYGASTRATGIPARFSGSGSGTDFTLTISSLQSDDFAVYYCQQYNNWPLTFGCGTKVEIKSGGGGQQVQLVQSGGEVKKPGASVKVSCKASGYTFTSYGISWVRQAPGQCLEWMGWISPQTGNAIYAQKLQGRVTMTRDTSTSTAYMELRSLRSDDTAVYYCARDPDYYGSGSYSDYWGQGTLVTVSSGGGGQGGGGQGGGGQEIVLTQSPATLSVSPGERATLSCRASQSVSSNLAWYQQKPGQAPRLLIYGASSRATGIPARFSGSGSGTEFTLTISSLQSEDFAVYYCQQYHSWPLLTFGCGTKVEIKSGGGGQEVQLVESGGGLVQPGGSLKLSCAASGFTFNKYAINWVRQAPGKGLEWVARIRSKYNNYATYYADAVKDRFTISRDDSKNTVYLQMNNLKTEDTAVYYCARAGNFGSSYISYWAYWGQGTLVTVSSGGGGQGGGGQGGGGQQTVVTQEPSLTVSPGGTVTITCGSSTGAVTSGNYPNWVQKKPGQAPRGLIGGTKFLAPGTPARFSGSLSGGKAALTLSGVQPEDEAEYYCVLWYSNRWVFGSGTKLTVL

SEQ ID NO: 355 - protein, 1241 aa, Artificial Sequence
  Synthetic
EVQLVESGGGLVQPGRSLRLSCAASGFTFHDYTMHWVRQAPGKCLEWVSGISWNTGTIGYADSVKGRFTISRDNAKNSLYLQMNSLRAEDTALYYCVKDAFYGGDYYYNYGMDVWGHGTTVTVSSGGGGSGGGGSGGGGSEIVLTQSPATLSVSPGERATLSCRASQSVNNNLAWYQQKPGQAPRLLIYGASTRATGIPARFSGSGSGTDFTLTISSLQSDDFAVYYCQQYNNWPLTFGCGTKVEIKSGGGGSQVQLVQSGGEVKKPGASVKVSCKASGYTFTSYGISWVRQAPGQCLEWMGWISPQTGNAIYAQKLQGRVTMTRDTSTSTAYMELRSLRSDDTAVYYCARDPDYYGSGSYSDYWGQGTLVTVSSGGGGSGGGGSGGGGSEIVLTQSPATLSVSPGERATLSCRASQSVSSNLAWYQQKPGQAPRLLIYGASSRATGIPARFSGSGSGTEFTLTISSLQSEDFAVYYCQQYHSWPLLTFGCGTKVEIKSGGGGSEVQLVESGGGLVQPGGSLKLSCAASGFTFNKYAMNWVRQAPGKGLEWVARIRSKYNNYATYYADSVKDRFTISRDDSKNTAYLQMNNLKTEDTAVYYCVRHGNFGNSYISYWAYWGQGTLVTVSSGGGGSGGGGSGGGGSQTVVTQEPSLTVSPGGTVTLTCGSSTGAVTSGNYPNWVQQKPGQAPRGLIGGTKFLAPGTPARFSGSLLGGKAALTLSGVQPEDEAEYYCVLWYSNRWVFGGGTKLTVLGGGGDKTHTCPPCPAPELLGGPSVFLFPPKPKDTLMISRTPEVTCVVVDVSHEDPEVKFNWYVDGVEVHNAKTKPCEEQYGSTYRCVSVLTVLHQDWLNGKEYKCKVSNKALPAPIEKTISKAKGQPREPQVYTLPPSREEMTKNQVSLTCLVKGFYPSDIAVEWESNGQPENNYKTTPPVLDSDGSFFLYSKLTVDKSRWQQGNVFSCSVMHEALHNHYTQKSLSLSPGKGGGGSGGGGSGGGGSGGGGSGGGGSGGGGSDKTHTCPPCPAPELLGGPSVFLFPPKPKDTLMISRTPEVTCVVVDVSHEDPEVKFNWYVDGVEVHNAKTKPCEEQYGSTYRCVSVLTVLHQDWLNGKEYKCKVSNKALPAPIEKTISKAKGQPREPQVYTLPPSREEMTKNQVSLTCLVKGFYPSDIAVEWESNGQPENNYKTTPPVLDSDGSFFLYSKLTVDKSRWQQGNVFSCSVMHEALHNHYTQKSLSLSPGK

SEQ ID NO: 356 - protein, 1231 aa, Artificial Sequence
  Synthetic
EVQLVESGGGLVQPGRSLRLSCAASGFTFHDYTMHWVRQAPGKCLEWVSGISWNTGTIGYADSVKGRFTISRDNAKNSLYLQMNSLRAEDTALYYCVKDAFYGGDYYYNYGMDVWGHGTTVTVSSGGGGQGGGGQGGGGQEIVLTQSPATLSVSPGERATLSCRASQSVNNNLAWYQQKPGQAPRLLIYGASTRATGIPARFSGSGSGTDFTLTISSLQSDDFAVYYCQQYNNWPLTFGCGTKVEIKSGGGGQQVQLVQSGGEVKKPGASVKVSCKASGYTFTSYGISWVRQAPGQCLEWMGWISPQTGNAIYAQKLQGRVTMTRDTSTSTAYMELRSLRSDDTAVYYCARDPDYYGSGSYSDYWGQGTLVTVSSGGGGQGGGGQGGGGQEIVLTQSPATLSVSPGERATLSCRASQSVSSNLAWYQQKPGQAPRLLIYGASSRATGIPARFSGSGSGTEFTLTISSLQSEDFAVYYCQQYHSWPLLTFGCGTKVEIKSGGGGQEVQLVESGGGLVQPGGSLKLSCAASGFTFNKYAMNWVRQAPGKGLEWVARIRSKYNNYATYYADSVKDRFTISRDDSKNTAYLQMNNLKTEDTAVYYCVRHGNFGNSYISYWAYWGQGTLVTVSSGGGGQGGGGQGGGGQQTVVTQEPSLTVSPGGTVTLTCGSSTGAVTSGNYPNWVQQKPGQAPRGLIGGTKFLAPGTPARFSGSLLGGKAALTLSGVQPEDEAEYYCVLWYSNRWVFGGGTKLTVLGGGGCPPCPAPELLGGPSVFLFPPKPKDTLMISRTPEVTCVVVDVSHEEPEVKFNWYVDGVEVHNAKTKPCEEQYGSTYRCVSVLTVLHQDWLNGKEYKCKVSNKALPAPIEKTISKAKGQPREPQVYTLPPSREEMTKNQVSLTCLVKGFYPSDIAVEWESNGQPENNYKTTPPVLDSDGSFFLYSKLTVDKSRWQQGNVFSCSVMHEALHNHYTQKSLSLSPGKGGGGQGGGGQGGGGQGGGGQGGGGQGGGGQCPPCPAPELLGGPSVFLFPPKPKDTLMISRTPEVTCVVVDVSHEEPEVKFNWYVDGVEVHNAKTKPCEEQYGSTYRCVSVLTVLHQDWLNGKEYKCKVSNKALPAPIEKTISKAKGQPREPQVYTLPPSREEMTKNQVSLTCLVKGFYPSDIAVEWESNGQPENNYKTTPPVLDSDGSFFLYSKLTVDKSRWQQGNVFSCSVMHEALHNHYTQKSLSLSPGK

SEQ ID NO: 357 - protein, 1241 aa, Artificial Sequence
  Synthetic
EVQLVESGGGLVQPGRSLRLSCAASGFTFHDYTMHWVRQAPGKCLEWVSGISWNTGTIGYADSVKGRFTISRDNAKNSLYLQMNSLRAEDTALYYCVKDAFYGGDYYYNYGMDVWGHGTTVTVSSGGGGSGGGGSGGGGSEIVLTQSPATLSVSPGERATLSCRASQSVNNNLAWYQQKPGQAPRLLIYGASTRATGIPARFSGSGSGTDFTLTISSLQSDDFAVYYCQQYNNWPLTFGCGTKVEIKSGGGGSQVQLVQSGGEVKKPGASVKVSCKASGYTFTSYGISWVRQAPGQCLEWMGWISPQTGNAIYAQKLQGRVTMTRDTSTSTAYMELRSLRSDDTAVYYCARDPDYYGSGSYSDYWGQGTLVTVSSGGGGSGGGGSGGGGSEIVLTQSPATLSVSPGERATLSCRASQSVSSNLAWYQQKPGQAPRLLIYGASSRATGIPARFSGSGSGTEFTLTISSLQSEDFAVYYCQQYHSWPLLTFGCGTKVEIKSGGGGSEVQLVESGGGLVQPGGSLKLSCAASGFTFNKYAINWVRQAPGKGLEWVARIRSKYNNYATYYADAVKDRFTISRDDSKNTVYLQMNNLKTEDTAVYYCARAGNFGSSYISYWAYWGQGTLVTVSSGGGGSGGGGSGGGGSQTVVTQEPSLTVSPGGTVTITCGSSTGAVTSGNYPNWVQKKPGQAPRGLIGGTKFLAPGTPARFSGSLSGGKAALTLSGVQPEDEAEYYCVLWYSNRWVFGSGTKLTVLGGGGDKTHTCPPCPAPELLGGPSVFLFPPKPKDTLMISRTPEVTCVVVDVSHEDPEVKFNWYVDGVEVHNAKTKPCEEQYGSTYRCVSVLTVLHQDWLNGKEYKCKVSNKALPAPIEKTISKAKGQPREPQVYTLPPSREEMTKNQVSLTCLVKGFYPSDIAVEWESNGQPENNYKTTPPVLDSDGSFFLYSKLTVDKSRWQQGNVFSCSVMHEALHNHYTQKSLSLSPGKGGGGSGGGGSGGGGSGGGGSGGGGSGGGGSDKTHTCPPCPAPELLGGPSVFLFPPKPKDTLMISRTPEVTCVVVDVSHEDPEVKFNWYVDGVEVHNAKTKPCEEQYGSTYRCVSVLTVLHQDWLNGKEYKCKVSNKALPAPIEKTISKAKGQPREPQVYTLPPSREEMTKNQVSLTCLVKGFYPSDIAVEWESNGQPENNYKTTPPVLDSDGSFFLYSKLTVDKSRWQQGNVFSCSVMHEALHNHYTQKSLSLSPGK

SEQ ID NO: 358 - protein, 1231 aa, Artificial Sequence
  Synthetic
EVQLVESGGGLVQPGRSLRLSCAASGFTFHDYTMHWVRQAPGKCLEWVSGISWNTGTIGYADSVKGRFTISRDNAKNSLYLQMNSLRAEDTALYYCVKDAFYGGDYYYNYGMDVWGHGTTVTVSSGGGGQGGGGQGGGGQEIVLTQSPATLSVSPGERATLSCRASQSVNNNLAWYQQKPGQAPRLLIYGASTRATGIPARFSGSGSGTDFTLTISSLQSDDFAVYYCQQYNNWPLTFGCGTKVEIKSGGGGQQVQLVQSGGEVKKPGASVKVSCKASGYTFTSYGISWVRQAPGQCLEWMGWISPQTGNAIYAQKLQGRVTMTRDTSTSTAYMELRSLRSDDTAVYYCARDPDYYGSGSYSDYWGQGTLVTVSSGGGGQGGGGQGGGGQEIVLTQSPATLSVSPGERATLSCRASQSVSSNLAWYQQKPGQAPRLLIYGASSRATGIPARFSGSGSGTEFTLTISSLQSEDFAVYYCQQYHSWPLLTFGCGTKVEIKSGGGGQEVQLVESGGGLVQPGGSLKLSCAASGFTFNKYAINWVRQAPGKGLEWVARIRSKYNNYATYYADAVKDRFTISRDDSKNTVYLQMNNLKTEDTAVYYCARAGNFGSSYISYWAYWGQGTLVTVSSGGGGQGGGGQGGGGQQTVVTQEPSLTVSPGGTVTITCGSSTGAVTSGNYPNWVQKKPGQAPRGLIGGTKFLAPGTPARFSGSLSGGKAALTLSGVQPEDEAEYYCVLWYSNRWVFGSGTKLTVLGGGGCPPCPAPELLGGPSVFLFPPKPKDTLMISRTPEVTCVVVDVSHEEPEVKFNWYVDGVEVHNAKTKPCEEQYGSTYRCVSVLTVLHQDWLNGKEYKCKVSNKALPAPIEKTISKAKGQPREPQVYTLPPSREEMTKNQVSLTCLVKGFYPSDIAVEWESNGQPENNYKTTPPVLDSDGSFFLYSKLTVDKSRWQQGNVFSCSVMHEALHNHYTQKSLSLSPGKGGGGQGGGGQGGGGQGGGGQGGGGQGGGGQCPPCPAPELLGGPSVFLFPPKPKDTLMISRTPEVTCVVVDVSHEEPEVKFNWYVDGVEVHNAKTKPCEEQYGSTYRCVSVLTVLHQDWLNGKEYKCKVSNKALPAPIEKTISKAKGQPREPQVYTLPPSREEMTKNQVSLTCLVKGFYPSDIAVEWESNGQPENNYKTTPPVLDSDGSFFLYSKLTVDKSRWQQGNVFSCSVMHEALHNHYTQKSLSLSPGK

SEQ ID NO: 359 - protein, 498 aa, Artificial Sequence
  Synthetic
EVQLVESGGGLVQPGRSLRLSCAASGFTFHDYTMHWVRQAPGKCLEWVSGISWNTGTIGYADSVKGRFTISRDNAKNSLYLQMNSLRAEDTALYYCVKDAFYGGDYYYNYGMDVWGHGTTVTVSSGGGGSGGGGSGGGGSEIVLTQSPATLSVSPGERATLSCRASQSVNNNLAWYQQKPGQAPRLLIYGASTRATGIPARFSGSGSGTDFTLTISSLQSDDFAVYYCQQYNNWPLTFGCGTKVEIKSGGGGSQVQLVQSGAEVKKPGASVKVSCKASGYTFTSYGISWVRQAPGQCLEWMGWISAYNGNAIYAQKLQGRVTMTRDTSTSTAYMELRSLRSDDTAVYYCARDPDYYGSGSYSDYWGQGTLVTVSSGGGGSGGGGSGGGGSEIVLTQSPATLSVSPGERATLSCRASQSVSSNLAWYQQKPGQAPRLLIYGASSRATGIPARFSGSGSGTEFTLTISSLQSEDFAVYYCQQYHSWPILHFGCGTKVEIK

SEQ ID NO: 360 - protein, 498 aa, Artificial Sequence
  Synthetic
EVQLVESGGGLVQPGRSLRLSCAASGFTFHDYTMHWVRQAPGKCLEWVSGISWNTGTIGYADSVKGRFTISRDNAKNSLYLQMNSLRAEDTALYYCVKDAFYGGDYYYNYGMDVWGHGTTVTVSSGGGGQGGGGQGGGGQEIVLTQSPATLSVSPGERATLSCRASQSVNNNLAWYQQKPGQAPRLLIYGASTRATGIPARFSGSGSGTDFTLTISSLQSDDFAVYYCQQYNNWPLTFGCGTKVEIKSGGGGQQVQLVQSGAEVKKPGASVKVSCKASGYTFTSYGISWVRQAPGQCLEWMGWISAYNGNAIYAQKLQGRVTMTRDTSTSTAYMELRSLRSDDTAVYYCARDPDYYGSGSYSDYWGQGTLVTVSSGGGGQGGGGQGGGGQEIVLTQSPATLSVSPGERATLSCRASQSVSSNLAWYQQKPGQAPRLLIYGASSRATGIPARFSGSGSGTEFTLTISSLQSEDFAVYYCQQYHSWPILHFGCGTKVEIK

SEQ ID NO: 361 - protein, 753 aa, Artificial Sequence
  Synthetic
EVQLVESGGGLVQPGRSLRLSCAASGFTFHDYTMHWVRQAPGKCLEWVSGISWNTGTIGYADSVKGRFTISRDNAKNSLYLQMNSLRAEDTALYYCVKDAFYGGDYYYNYGMDVWGHGTTVTVSSGGGGSGGGGSGGGGSEIVLTQSPATLSVSPGERATLSCRASQSVNNNLAWYQQKPGQAPRLLIYGASTRATGIPARFSGSGSGTDFTLTISSLQSDDFAVYYCQQYNNWPLTFGCGTKVEIKSGGGGSQVQLVQSGAEVKKPGASVKVSCKASGYTFTSYGISWVRQAPGQCLEWMGWISAYNGNAIYAQKLQGRVTMTRDTSTSTAYMELRSLRSDDTAVYYCARDPDYYGSGSYSDYWGQGTLVTVSSGGGGSGGGGSGGGGSEIVLTQSPATLSVSPGERATLSCRASQSVSSNLAWYQQKPGQAPRLLIYGASSRATGIPARFSGSGSGTEFTLTISSLQSEDFAVYYCQQYHSWPILHFGCGTKVEIKSGGGGSEVQLVESGGGLVQPGGSLKLSCAASGFTFNKYAMNWVRQAPGKGLEWVARIRSKYNNYATYYADSVKDRFTISRDDSKNTAYLQMNNLKTEDTAVYYCVRHGNFGNSYISYWAYWGQGTLVTVSSGGGGSGGGGSGGGGSQTVVTQEPSLTVSPGGTVTLTCGSSTGAVTSGNYPNWVQQKPGQAPRGLIGGTKFLAPGTPARFSGSLLGGKAALTLSGVQPEDEAEYYCVLWYSNRWVFGGGTKLTVL

SEQ ID NO: 362 - protein, 753 aa, Artificial Sequence
  Synthetic
EVQLVESGGGLVQPGRSLRLSCAASGFTFHDYTMHWVRQAPGKCLEWVSGISWNTGTIGYADSVKGRFTISRDNAKNSLYLQMNSLRAEDTALYYCVKDAFYGGDYYYNYGMDVWGHGTTVTVSSGGGGQGGGGQGGGGQEIVLTQSPATLSVSPGERATLSCRASQSVNNNLAWYQQKPGQAPRLLIYGASTRATGIPARFSGSGSGTDFTLTISSLQSDDFAVYYCQQYNNWPLTFGCGTKVEIKSGGGGQQVQLVQSGAEVKKPGASVKVSCKASGYTFTSYGISWVRQAPGQCLEWMGWISAYNGNAIYAQKLQGRVTMTRDTSTSTAYMELRSLRSDDTAVYYCARDPDYYGSGSYSDYWGQGTLVTVSSGGGGQGGGGQGGGGQEIVLTQSPATLSVSPGERATLSCRASQSVSSNLAWYQQKPGQAPRLLIYGASSRATGIPARFSGSGSGTEFTLTISSLQSEDFAVYYCQQYHSWPILHFGCGTKVEIKSGGGGQEVQLVESGGGLVQPGGSLKLSCAASGFTFNKYAMNWVRQAPGKGLEWVARIRSKYNNYATYYADSVKDRFTISRDDSKNTAYLQMNNLKTEDTAVYYCVRHGNFGNSYISYWAYWGQGTLVTVSSGGGGQGGGGQGGGGQQTVVTQEPSLTVSPGGTVTLTCGSSTGAVTSGNYPNWVQQKPGQAPRGLIGGTKFLAPGTPARFSGSLLGGKAALTLSGVQPEDEAEYYCVLWYSNRWVFGGGTKLTVL

SEQ ID NO: 363 - protein, 753 aa, Artificial Sequence
  Synthetic
EVQLVESGGGLVQPGRSLRLSCAASGFTFHDYTMHWVRQAPGKCLEWVSGISWNTGTIGYADSVKGRFTISRDNAKNSLYLQMNSLRAEDTALYYCVKDAFYGGDYYYNYGMDVWGHGTTVTVSSGGGGSGGGGSGGGGSEIVLTQSPATLSVSPGERATLSCRASQSVNNNLAWYQQKPGQAPRLLIYGASTRATGIPARFSGSGSGTDFTLTISSLQSDDFAVYYCQQYNNWPLTFGCGTKVEIKSGGGGSQVQLVQSGAEVKKPGASVKVSCKASGYTFTSYGISWVRQAPGQCLEWMGWISAYNGNAIYAQKLQGRVTMTRDTSTSTAYMELRSLRSDDTAVYYCARDPDYYGSGSYSDYWGQGTLVTVSSGGGGSGGGGSGGGGSEIVLTQSPATLSVSPGERATLSCRASQSVSSNLAWYQQKPGQAPRLLIYGASSRATGIPARFSGSGSGTEFTLTISSLQSEDFAVYYCQQYHSWPILHFGCGTKVEIKSGGGGSEVQLVESGGGLVQPGGSLKLSCAASGFTFNKYAINWVRQAPGKGLEWVARIRSKYNNYATYYADAVKDRFTISRDDSKNTVYLQMNNLKTEDTAVYYCARAGNFGSSYISYWAYWGQGTLVTVSSGGGGSGGGGSGGGGSQTVVTQEPSLTVSPGGTVTITCGSSTGAVTSGNYPNWVQKKPGQAPRGLIGGTKFLAPGTPARFSGSLSGGKAALTLSGVQPEDEAEYYCVLWYSNRWVFGSGTKLTVL

SEQ ID NO: 364 - protein, 753 aa, Artificial Sequence
  Synthetic
EVQLVESGGGLVQPGRSLRLSCAASGFTFHDYTMHWVRQAPGKCLEWVSGISWNTGTIGYADSVKGRFTISRDNAKNSLYLQMNSLRAEDTALYYCVKDAFYGGDYYYNYGMDVWGHGTTVTVSSGGGGQGGGGQGGGGQEIVLTQSPATLSVSPGERATLSCRASQSVNNNLAWYQQKPGQAPRLLIYGASTRATGIPARFSGSGSGTDFTLTISSLQSDDFAVYYCQQYNNWPLTFGCGTKVEIKSGGGGQQVQLVQSGAEVKKPGASVKVSCKASGYTFTSYGISWVRQAPGQCLEWMGWISAYNGNAIYAQKLQGRVTMTRDTSTSTAYMELRSLRSDDTAVYYCARDPDYYGSGSYSDYWGQGTLVTVSSGGGGQGGGGQGGGGQEIVLTQSPATLSVSPGERATLSCRASQSVSSNLAWYQQKPGQAPRLLIYGASSRATGIPARFSGSGSGTEFTLTISSLQSEDFAVYYCQQYHSWPILHFGCGTKVEIKSGGGGQEVQLVESGGGLVQPGGSLKLSCAASGFTFNKYAINWVRQAPGKGLEWVARIRSKYNNYATYYADAVKDRFTISRDDSKNTVYLQMNNLKTEDTAVYYCARAGNFGSSYISYWAYWGQGTLVTVSSGGGGQGGGGQGGGGQQTVVTQEPSLTVSPGGTVTITCGSSTGAVTSGNYPNWVQKKPGQAPRGLIGGTKFLAPGTPARFSGSLSGGKAALTLSGVQPEDEAEYYCVLWYSNRWVFGSGTKLTVL

SEQ ID NO: 365 - protein, 1241 aa, Artificial Sequence
  Synthetic
EVQLVESGGGLVQPGRSLRLSCAASGFTFHDYTMHWVRQAPGKCLEWVSGISWNTGTIGYADSVKGRFTISRDNAKNSLYLQMNSLRAEDTALYYCVKDAFYGGDYYYNYGMDVWGHGTTVTVSSGGGGSGGGGSGGGGSEIVLTQSPATLSVSPGERATLSCRASQSVNNNLAWYQQKPGQAPRLLIYGASTRATGIPARFSGSGSGTDFTLTISSLQSDDFAVYYCQQYNNWPLTFGCGTKVEIKSGGGGSQVQLVQSGAEVKKPGASVKVSCKASGYTFTSYGISWVRQAPGQCLEWMGWISAYNGNAIYAQKLQGRVTMTRDTSTSTAYMELRSLRSDDTAVYYCARDPDYYGSGSYSDYWGQGTLVTVSSGGGGSGGGGSGGGGSEIVLTQSPATLSVSPGERATLSCRASQSVSSNLAWYQQKPGQAPRLLIYGASSRATGIPARFSGSGSGTEFTLTISSLQSEDFAVYYCQQYHSWPILHFGCGTKVEIKSGGGGSEVQLVESGGGLVQPGGSLKLSCAASGFTFNKYAMNWVRQAPGKGLEWVARIRSKYNNYATYYADSVKDRFTISRDDSKNTAYLQMNNLKTEDTAVYYCVRHGNFGNSYISYWAYWGQGTLVTVSSGGGGSGGGGSGGGGSQTVVTQEPSLTVSPGGTVTLTCGSSTGAVTSGNYPNWVQQKPGQAPRGLIGGTKFLAPGTPARFSGSLLGGKAALTLSGVQPEDEAEYYCVLWYSNRWVFGGGTKLTVLGGGGDKTHTCPPCPAPELLGGPSVFLFPPKPKDTLMISRTPEVTCVVVDVSHEDPEVKFNWYVDGVEVHNAKTKPCEEQYGSTYRCVSVLTVLHQDWLNGKEYKCKVSNKALPAPIEKTISKAKGQPREPQVYTLPPSREEMTKNQVSLTCLVKGFYPSDIAVEWESNGQPENNYKTTPPVLDSDGSFFLYSKLTVDKSRWQQGNVFSCSVMHEALHNHYTQKSLSLSPGKGGGGSGGGGSGGGGSGGGGSGGGGSGGGGSDKTHTCPPCPAPELLGGPSVFLFPPKPKDTLMISRTPEVTCVVVDVSHEDPEVKFNWYVDGVEVHNAKTKPCEEQYGSTYRCVSVLTVLHQDWLNGKEYKCKVSNKALPAPIEKTISKAKGQPREPQVYTLPPSREEMTKNQVSLTCLVKGFYPSDIAVEWESNGQPENNYKTTPPVLDSDGSFFLYSKLTVDKSRWQQGNVFSCSVMHEALHNHYTQKSLSLSPGK

SEQ ID NO: 366 - protein, 1231 aa, Artificial Sequence
  Synthetic
EVQLVESGGGLVQPGRSLRLSCAASGFTFHDYTMHWVRQAPGKCLEWVSGISWNTGTIGYADSVKGRFTISRDNAKNSLYLQMNSLRAEDTALYYCVKDAFYGGDYYYNYGMDVWGHGTTVTVSSGGGGQGGGGQGGGGQEIVLTQSPATLSVSPGERATLSCRASQSVNNNLAWYQQKPGQAPRLLIYGASTRATGIPARFSGSGSGTDFTLTISSLQSDDFAVYYCQQYNNWPLTFGCGTKVEIKSGGGGQQVQLVQSGAEVKKPGASVKVSCKASGYTFTSYGISWVRQAPGQCLEWMGWISAYNGNAIYAQKLQGRVTMTRDTSTSTAYMELRSLRSDDTAVYYCARDPDYYGSGSYSDYWGQGTLVTVSSGGGGQGGGGQGGGGQEIVLTQSPATLSVSPGERATLSCRASQSVSSNLAWYQQKPGQAPRLLIYGASSRATGIPARFSGSGSGTEFTLTISSLQSEDFAVYYCQQYHSWPILHFGCGTKVEIKSGGGGQEVQLVESGGGLVQPGGSLKLSCAASGFTFNKYAMNWVRQAPGKGLEWVARIRSKYNNYATYYADSVKDRFTISRDDSKNTAYLQMNNLKTEDTAVYYCVRHGNFGNSYISYWAYWGQGTLVTVSSGGGGQGGGGQGGGGQQTVVTQEPSLTVSPGGTVTLTCGSSTGAVTSGNYPNWVQQKPGQAPRGLIGGTKFLAPGTPARFSGSLLGGKAALTLSGVQPEDEAEYYCVLWYSNRWVFGGGTKLTVLGGGGCPPCPAPELLGGPSVFLFPPKPKDTLMISRTPEVTCVVVDVSHEEPEVKFNWYVDGVEVHNAKTKPCEEQYGSTYRCVSVLTVLHQDWLNGKEYKCKVSNKALPAPIEKTISKAKGQPREPQVYTLPPSREEMTKNQVSLTCLVKGFYPSDIAVEWESNGQPENNYKTTPPVLDSDGSFFLYSKLTVDKSRWQQGNVFSCSVMHEALHNHYTQKSLSLSPGKGGGGQGGGGQGGGGQGGGGQGGGGQGGGGQCPPCPAPELLGGPSVFLFPPKPKDTLMISRTPEVTCVVVDVSHEEPEVKFNWYVDGVEVHNAKTKPCEEQYGSTYRCVSVLTVLHQDWLNGKEYKCKVSNKALPAPIEKTISKAKGQPREPQVYTLPPSREEMTKNQVSLTCLVKGFYPSDIAVEWESNGQPENNYKTTPPVLDSDGSFFLYSKLTVDKSRWQQGNVFSCSVMHEALHNHYTQKSLSLSPGK

SEQ ID NO: 367 - protein, 1241 aa, Artificial Sequence
  Synthetic
EVQLVESGGGLVQPGRSLRLSCAASGFTFHDYTMHWVRQAPGKCLEWVSGISWNTGTIGYADSVKGRFTISRDNAKNSLYLQMNSLRAEDTALYYCVKDAFYGGDYYYNYGMDVWGHGTTVTVSSGGGGSGGGGSGGGGSEIVLTQSPATLSVSPGERATLSCRASQSVNNNLAWYQQKPGQAPRLLIYGASTRATGIPARFSGSGSGTDFTLTISSLQSDDFAVYYCQQYNNWPLTFGCGTKVEIKSGGGGSQVQLVQSGAEVKKPGASVKVSCKASGYTFTSYGISWVRQAPGQCLEWMGWISAYNGNAIYAQKLQGRVTMTRDTSTSTAYMELRSLRSDDTAVYYCARDPDYYGSGSYSDYWGQGTLVTVSSGGGGSGGGGSGGGGSEIVLTQSPATLSVSPGERATLSCRASQSVSSNLAWYQQKPGQAPRLLIYGASSRATGIPARFSGSGSGTEFTLTISSLQSEDFAVYYCQQYHSWPILHFGCGTKVEIKSGGGGSEVQLVESGGGLVQPGGSLKLSCAASGFTFNKYAINWVRQAPGKGLEWVARIRSKYNNYATYYADAVKDRFTISRDDSKNTVYLQMNNLKTEDTAVYYCARAGNFGSSYISYWAYWGQGTLVTVSSGGGGSGGGGSGGGGSQTVVTQEPSLTVSPGGTVTITCGSSTGAVTSGNYPNWVQKKPGQAPRGLIGGTKFLAPGTPARFSGSLSGGKAALTLSGVQPEDEAEYYCVLWYSNRWVFGSGTKLTVLGGGGDKTHTCPPCPAPELLGGPSVFLFPPKPKDTLMISRTPEVTCVVVDVSHEDPEVKFNWYVDGVEVHNAKTKPCEEQYGSTYRCVSVLTVLHQDWLNGKEYKCKVSNKALPAPIEKTISKAKGQPREPQVYTLPPSREEMTKNQVSLTCLVKGFYPSDIAVEWESNGQPENNYKTTPPVLDSDGSFFLYSKLTVDKSRWQQGNVFSCSVMHEALHNHYTQKSLSLSPGKGGGGSGGGGSGGGGSGGGGSGGGGSGGGGSDKTHTCPPCPAPELLGGPSVFLFPPKPKDTLMISRTPEVTCVVVDVSHEDPEVKFNWYVDGVEVHNAKTKPCEEQYGSTYRCVSVLTVLHQDWLNGKEYKCKVSNKALPAPIEKTISKAKGQPREPQVYTLPPSREEMTKNQVSLTCLVKGFYPSDIAVEWESNGQPENNYKTTPPVLDSDGSFFLYSKLTVDKSRWQQGNVFSCSVMHEALHNHYTQKSLSLSPGK

SEQ ID NO: 368 - protein, 1231 aa, Artificial Sequence
  Synthetic
EVQLVESGGGLVQPGRSLRLSCAASGFTFHDYTMHWVRQAPGKCLEWVSGISWNTGTIGYADSVKGRFTISRDNAKNSLYLQMNSLRAEDTALYYCVKDAFYGGDYYYNYGMDVWGHGTTVTVSSGGGGQGGGGQGGGGQEIVLTQSPATLSVSPGERATLSCRASQSVNNNLAWYQQKPGQAPRLLIYGASTRATGIPARFSGSGSGTDFTLTISSLQSDDFAVYYCQQYNNWPLTFGCGTKVEIKSGGGGQQVQLVQSGAEVKKPGASVKVSCKASGYTFTSYGISWVRQAPGQCLEWMGWISAYNGNAIYAQKLQGRVTMTRDTSTSTAYMELRSLRSDDTAVYYCARDPDYYGSGSYSDYWGQGTLVTVSSGGGGQGGGGQGGGGQEIVLTQSPATLSVSPGERATLSCRASQSVSSNLAWYQQKPGQAPRLLIYGASSRATGIPARFSGSGSGTEFTLTISSLQSEDFAVYYCQQYHSWPILHFGCGTKVEIKSGGGGQEVQLVESGGGLVQPGGSLKLSCAASGFTFNKYAINWVRQAPGKGLEWVARIRSKYNNYATYYADAVKDRFTISRDDSKNTVYLQMNNLKTEDTAVYYCARAGNFGSSYISYWAYWGQGTLVTVSSGGGGQGGGGQGGGGQQTVVTQEPSLTVSPGGTVTITCGSSTGAVTSGNYPNWVQKKPGQAPRGLIGGTKFLAPGTPARFSGSLSGGKAALTLSGVQPEDEAEYYCVLWYSNRWVFGSGTKLTVLGGGGCPPCPAPELLGGPSVFLFPPKPKDTLMISRTPEVTCVVVDVSHEEPEVKFNWYVDGVEVHNAKTKPCEEQYGSTYRCVSVLTVLHQDWLNGKEYKCKVSNKALPAPIEKTISKAKGQPREPQVYTLPPSREEMTKNQVSLTCLVKGFYPSDIAVEWESNGQPENNYKTTPPVLDSDGSFFLYSKLTVDKSRWQQGNVFSCSVMHEALHNHYTQKSLSLSPGKGGGGQGGGGQGGGGQGGGGQGGGGQGGGGQCPPCPAPELLGGPSVFLFPPKPKDTLMISRTPEVTCVVVDVSHEEPEVKFNWYVDGVEVHNAKTKPCEEQYGSTYRCVSVLTVLHQDWLNGKEYKCKVSNKALPAPIEKTISKAKGQPREPQVYTLPPSREEMTKNQVSLTCLVKGFYPSDIAVEWESNGQPENNYKTTPPVLDSDGSFFLYSKLTVDKSRWQQGNVFSCSVMHEALHNHYTQKSLSLSPGK

SEQ ID NO: 369 - protein, 492 aa, Artificial Sequence
  Synthetic
EVQLVESGGGLVQPGRSLRLSCAASGFTFHDYTMHWVRQAPGKCLEWVSGISWNTGTIGYADSVKGRFTISRDNAKNSLYLQMNSLRAEDTALYYCVKDAFYGGDYYYNYGMDVWGHGTTVTVSSGGGGSGGGGSGGGGSEIVLTQSPATLSVSPGERATLSCRASQSVNNNLAWYQQKPGQAPRLLIYGASTRATGIPARFSGSGSGTDFTLTISSLQSDDFAVYYCQQYNNWPLTFGCGTKVEIKSGGGGSQVQLVQSGAEVKKPGASVKVSCKASGYSFTSYGITWVRQAPGQCLEWMGWISAYNGNTIYAQKLQGRVTMTTDTSTSTAYMELRSLRSDDTAVYYCVRDSNHEDFWGQGTLVTVSSGGGGSGGGGSGGGGSEIVLTQSPATLSVSPGERATLSCRASQSVSSNLAWYQQKPGQAPRLLIYGASTRATGIPARFSGSGSGTEFTLTISSLQSEDFAVYYCQQYHTWPPVTFGCGTKVEIK

SEQ ID NO: 370 - protein, 492 aa, Artificial Sequence
  Synthetic
EVQLVESGGGLVQPGRSLRLSCAASGFTFHDYTMHWVRQAPGKCLEWVSGISWNTGTIGYADSVKGRFTISRDNAKNSLYLQMNSLRAEDTALYYCVKDAFYGGDYYYNYGMDVWGHGTTVTVSSGGGGQGGGGQGGGGQEIVLTQSPATLSVSPGERATLSCRASQSVNNNLAWYQQKPGQAPRLLIYGASTRATGIPARFSGSGSGTDFTLTISSLQSDDFAVYYCQQYNNWPLTFGCGTKVEIKSGGGGQQVQLVQSGAEVKKPGASVKVSCKASGYSFTSYGITWVRQAPGQCLEWMGWISAYNGNTIYAQKLQGRVTMTTDTSTSTAYMELRSLRSDDTAVYYCVRDSNHEDFWGQGTLVTVSSGGGGQGGGGQGGGGQEIVLTQSPATLSVSPGERATLSCRASQSVSSNLAWYQQKPGQAPRLLIYGASTRATGIPARFSGSGSGTEFTLTISSLQSEDFAVYYCQQYHTWPPVTFGCGTKVEIK

SEQ ID NO: 371 - protein, 747 aa, Artificial Sequence
  Synthetic
EVQLVESGGGLVQPGRSLRLSCAASGFTFHDYTMHWVRQAPGKCLEWVSGISWNTGTIGYADSVKGRFTISRDNAKNSLYLQMNSLRAEDTALYYCVKDAFYGGDYYYNYGMDVWGHGTTVTVSSGGGGSGGGGSGGGGSEIVLTQSPATLSVSPGERATLSCRASQSVNNNLAWYQQKPGQAPRLLIYGASTRATGIPARFSGSGSGTDFTLTISSLQSDDFAVYYCQQYNNWPLTFGCGTKVEIKSGGGGSQVQLVQSGAEVKKPGASVKVSCKASGYSFTSYGITWVRQAPGQCLEWMGWISAYNGNTIYAQKLQGRVTMTTDTSTSTAYMELRSLRSDDTAVYYCVRDSNHEDFWGQGTLVTVSSGGGGSGGGGSGGGGSEIVLTQSPATLSVSPGERATLSCRASQSVSSNLAWYQQKPGQAPRLLIYGASTRATGIPARFSGSGSGTEFTLTISSLQSEDFAVYYCQQYHTWPPVTFGCGTKVEIKSGGGGSEVQLVESGGGLVQPGGSLKLSCAASGFTFNKYAMNWVRQAPGKGLEWVARIRSKYNNYATYYADSVKDRFTISRDDSKNTAYLQMNNLKTEDTAVYYCVRHGNFGNSYISYWAYWGQGTLVTVSSGGGGSGGGGSGGGGSQTVVTQEPSLTVSPGGTVTLTCGSSTGAVTSGNYPNWVQQKPGQAPRGLIGGTKFLAPGTPARFSGSLLGGKAALTLSGVQPEDEAEYYCVLWYSNRWVFGGGTKLTVL

SEQ ID NO: 372 - protein, 747 aa, Artificial Sequence
  Synthetic
EVQLVESGGGLVQPGRSLRLSCAASGFTFHDYTMHWVRQAPGKCLEWVSGISWNTGTIGYADSVKGRFTISRDNAKNSLYLQMNSLRAEDTALYYCVKDAFYGGDYYYNYGMDVWGHGTTVTVSSGGGGQGGGGQGGGGQEIVLTQSPATLSVSPGERATLSCRASQSVNNNLAWYQQKPGQAPRLLIYGASTRATGIPARFSGSGSGTDFTLTISSLQSDDFAVYYCQQYNNWPLTFGCGTKVEIKSGGGGQQVQLVQSGAEVKKPGASVKVSCKASGYSFTSYGITWVRQAPGQCLEWMGWISAYNGNTIYAQKLQGRVTMTTDTSTSTAYMELRSLRSDDTAVYYCVRDSNHEDFWGQGTLVTVSSGGGGQGGGGQGGGGQEIVLTQSPATLSVSPGERATLSCRASQSVSSNLAWYQQKPGQAPRLLIYGASTRATGIPARFSGSGSGTEFTLTISSLQSEDFAVYYCQQYHTWPPVTFGCGTKVEIKSGGGGQEVQLVESGGGLVQPGGSLKLSCAASGFTFNKYAMNWVRQAPGKGLEWVARIRSKYNNYATYYADSVKDRFTISRDDSKNTAYLQMNNLKTEDTAVYYCVRHGNFGNSYISYWAYWGQGTLVTVSSGGGGQGGGGQGGGGQQTVVTQEPSLTVSPGGTVTLTCGSSTGAVTSGNYPNWVQQKPGQAPRGLIGGTKFLAPGTPARFSGSLLGGKAALTLSGVQPEDEAEYYCVLWYSNRWVFGGGTKLTVL

SEQ ID NO: 373 - protein, 747 aa, Artificial Sequence
  Synthetic
EVQLVESGGGLVQPGRSLRLSCAASGFTFHDYTMHWVRQAPGKCLEWVSGISWNTGTIGYADSVKGRFTISRDNAKNSLYLQMNSLRAEDTALYYCVKDAFYGGDYYYNYGMDVWGHGTTVTVSSGGGGSGGGGSGGGGSEIVLTQSPATLSVSPGERATLSCRASQSVNNNLAWYQQKPGQAPRLLIYGASTRATGIPARFSGSGSGTDFTLTISSLQSDDFAVYYCQQYNNWPLTFGCGTKVEIKSGGGGSQVQLVQSGAEVKKPGASVKVSCKASGYSFTSYGITWVRQAPGQCLEWMGWISAYNGNTIYAQKLQGRVTMTTDTSTSTAYMELRSLRSDDTAVYYCVRDSNHEDFWGQGTLVTVSSGGGGSGGGGSGGGGSEIVLTQSPATLSVSPGERATLSCRASQSVSSNLAWYQQKPGQAPRLLIYGASTRATGIPARFSGSGSGTEFTLTISSLQSEDFAVYYCQQYHTWPPVTFGCGTKVEIKSGGGGSEVQLVESGGGLVQPGGSLKLSCAASGFTFNKYAINWVRQAPGKGLEWVARIRSKYNNYATYYADAVKDRFTISRDDSKNTVYLQMNNLKTEDTAVYYCARAGNFGSSYISYWAYWGQGTLVTVSSGGGGSGGGGSGGGGSQTVVTQEPSLTVSPGGTVTITCGSSTGAVTSGNYPNWVQKKPGQAPRGLIGGTKFLAPGTPARFSGSLSGGKAALTLSGVQPEDEAEYYCVLWYSNRWVFGSGTKLTVL

SEQ ID NO: 374 - protein, 747 aa, Artificial Sequence
  Synthetic
EVQLVESGGGLVQPGRSLRLSCAASGFTFHDYTMHWVRQAPGKCLEWVSGISWNTGTIGYADSVKGRFTISRDNAKNSLYLQMNSLRAEDTALYYCVKDAFYGGDYYYNYGMDVWGHGTTVTVSSGGGGQGGGGQGGGGQEIVLTQSPATLSVSPGERATLSCRASQSVNNNLAWYQQKPGQAPRLLIYGASTRATGIPARFSGSGSGTDFTLTISSLQSDDFAVYYCQQYNNWPLTFGCGTKVEIKSGGGGQQVQLVQSGAEVKKPGASVKVSCKASGYSFTSYGITWVRQAPGQCLEWMGWISAYNGNTIYAQKLQGRVTMTTDTSTSTAYMELRSLRSDDTAVYYCVRDSNHEDFWGQGTLVTVSSGGGGQGGGGQGGGGQEIVLTQSPATLSVSPGERATLSCRASQSVSSNLAWYQQKPGQAPRLLIYGASTRATGIPARFSGSGSGTEFTLTISSLQSEDFAVYYCQQYHTWPPVTFGCGTKVEIKSGGGGQEVQLVESGGGLVQPGGSLKLSCAASGFTFNKYAINWVRQAPGKGLEWVARIRSKYNNYATYYADAVKDRFTISRDDSKNTVYLQMNNLKTEDTAVYYCARAGNFGSSYISYWAYWGQGTLVTVSSGGGGQGGGGQGGGGQQTVVTQEPSLTVSPGGTVTITCGSSTGAVTSGNYPNWVQKKPGQAPRGLIGGTKFLAPGTPARFSGSLSGGKAALTLSGVQPEDEAEYYCVLWYSNRWVFGSGTKLTVL

SEQ ID NO: 375 - protein, 1235 aa, Artificial Sequence
  Synthetic
EVQLVESGGGLVQPGRSLRLSCAASGFTFHDYTMHWVRQAPGKCLEWVSGISWNTGTIGYADSVKGRFTISRDNAKNSLYLQMNSLRAEDTALYYCVKDAFYGGDYYYNYGMDVWGHGTTVTVSSGGGGSGGGGSGGGGSEIVLTQSPATLSVSPGERATLSCRASQSVNNNLAWYQQKPGQAPRLLIYGASTRATGIPARFSGSGSGTDFTLTISSLQSDDFAVYYCQQYNNWPLTFGCGTKVEIKSGGGGSQVQLVQSGAEVKKPGASVKVSCKASGYSFTSYGITWVRQAPGQCLEWMGWISAYNGNTIYAQKLQGRVTMTTDTSTSTAYMELRSLRSDDTAVYYCVRDSNHEDFWGQGTLVTVSSGGGGSGGGGSGGGGSEIVLTQSPATLSVSPGERATLSCRASQSVSSNLAWYQQKPGQAPRLLIYGASTRATGIPARFSGSGSGTEFTLTISSLQSEDFAVYYCQQYHTWPPVTFGCGTKVEIKSGGGGSEVQLVESGGGLVQPGGSLKLSCAASGFTFNKYAMNWVRQAPGKGLEWVARIRSKYNNYATYYADSVKDRFTISRDDSKNTAYLQMNNLKTEDTAVYYCVRHGNFGNSYISYWAYWGQGTLVTVSSGGGGSGGGGSGGGGSQTVVTQEPSLTVSPGGTVTLTCGSSTGAVTSGNYPNWVQQKPGQAPRGLIGGTKFLAPGTPARFSGSLLGGKAALTLSGVQPEDEAEYYCVLWYSNRWVFGGGTKLTVLGGGGDKTHTCPPCPAPELLGGPSVFLFPPKPKDTLMISRTPEVTCVVVDVSHEDPEVKFNWYVDGVEVHNAKTKPCEEQYGSTYRCVSVLTVLHQDWLNGKEYKCKVSNKALPAPIEKTISKAKGQPREPQVYTLPPSREEMTKNQVSLTCLVKGFYPSDIAVEWESNGQPENNYKTTPPVLDSDGSFFLYSKLTVDKSRWQQGNVFSCSVMHEALHNHYTQKSLSLSPGKGGGGSGGGGSGGGGSGGGGSGGGGSGGGGSDKTHTCPPCPAPELLGGPSVFLFPPKPKDTLMISRTPEVTCVVVDVSHEDPEVKFNWYVDGVEVHNAKTKPCEEQYGSTYRCVSVLTVLHQDWLNGKEYKCKVSNKALPAPIEKTISKAKGQPREPQVYTLPPSREEMTKNQVSLTCLVKGFYPSDIAVEWESNGQPENNYKTTPPVLDSDGSFFLYSKLTVDKSRWQQGNVFSCSVMHEALHNHYTQKSLSLSPGK

SEQ ID NO: 376 - protein, 1225 aa, Artificial Sequence
  Synthetic
EVQLVESGGGLVQPGRSLRLSCAASGFTFHDYTMHWVRQAPGKCLEWVSGISWNTGTIGYADSVKGRFTISRDNAKNSLYLQMNSLRAEDTALYYCVKDAFYGGDYYYNYGMDVWGHGTTVTVSSGGGGQGGGGQGGGGQEIVLTQSPATLSVSPGERATLSCRASQSVNNNLAWYQQKPGQAPRLLIYGASTRATGIPARFSGSGSGTDFTLTISSLQSDDFAVYYCQQYNNWPLTFGCGTKVEIKSGGGGQQVQLVQSGAEVKKPGASVKVSCKASGYSFTSYGITWVRQAPGQCLEWMGWISAYNGNTIYAQKLQGRVTMTTDTSTSTAYMELRSLRSDDTAVYYCVRDSNHEDFWGQGTLVTVSSGGGGQGGGGQGGGGQEIVLTQSPATLSVSPGERATLSCRASQSVSSNLAWYQQKPGQAPRLLIYGASTRATGIPARFSGSGSGTEFTLTISSLQSEDFAVYYCQQYHTWPPVTFGCGTKVEIKSGGGGQEVQLVESGGGLVQPGGSLKLSCAASGFTFNKYAMNWVRQAPGKGLEWVARIRSKYNNYATYYADSVKDRFTISRDDSKNTAYLQMNNLKTEDTAVYYCVRHGNFGNSYISYWAYWGQGTLVTVSSGGGGQGGGGQGGGGQQTVVTQEPSLTVSPGGTVTLTCGSSTGAVTSGNYPNWVQQKPGQAPRGLIGGTKFLAPGTPARFSGSLLGGKAALTLSGVQPEDEAEYYCVLWYSNRWVFGGGTKLTVLGGGGCPPCPAPELLGGPSVFLFPPKPKDTLMISRTPEVTCVVVDVSHEEPEVKFNWYVDGVEVHNAKTKPCEEQYGSTYRCVSVLTVLHQDWLNGKEYKCKVSNKALPAPIEKTISKAKGQPREPQVYTLPPSREEMTKNQVSLTCLVKGFYPSDIAVEWESNGQPENNYKTTPPVLDSDGSFFLYSKLTVDKSRWQQGNVFSCSVMHEALHNHYTQKSLSLSPGKGGGGQGGGGQGGGGQGGGGQGGGGQGGGGQCPPCPAPELLGGPSVFLFPPKPKDTLMISRTPEVTCVVVDVSHEEPEVKFNWYVDGVEVHNAKTKPCEEQYGSTYRCVSVLTVLHQDWLNGKEYKCKVSNKALPAPIEKTISKAKGQPREPQVYTLPPSREEMTKNQVSLTCLVKGFYPSDIAVEWESNGQPENNYKTTPPVLDSDGSFFLYSKLTVDKSRWQQGNVFSCSVMHEALHNHYTQKSLSLSPGK

SEQ ID NO: 377 - protein, 1235 aa, Artificial Sequence
  Synthetic
EVQLVESGGGLVQPGRSLRLSCAASGFTFHDYTMHWVRQAPGKCLEWVSGISWNTGTIGYADSVKGRFTISRDNAKNSLYLQMNSLRAEDTALYYCVKDAFYGGDYYYNYGMDVWGHGTTVTVSSGGGGSGGGGSGGGGSEIVLTQSPATLSVSPGERATLSCRASQSVNNNLAWYQQKPGQAPRLLIYGASTRATGIPARFSGSGSGTDFTLTISSLQSDDFAVYYCQQYNNWPLTFGCGTKVEIKSGGGGSQVQLVQSGAEVKKPGASVKVSCKASGYSFTSYGITWVRQAPGQCLEWMGWISAYNGNTIYAQKLQGRVTMTTDTSTSTAYMELRSLRSDDTAVYYCVRDSNHEDFWGQGTLVTVSSGGGGSGGGGSGGGGSEIVLTQSPATLSVSPGERATLSCRASQSVSSNLAWYQQKPGQAPRLLIYGASTRATGIPARFSGSGSGTEFTLTISSLQSEDFAVYYCQQYHTWPPVTFGCGTKVEIKSGGGGSEVQLVESGGGLVQPGGSLKLSCAASGFTFNKYAINWVRQAPGKGLEWVARIRSKYNNYATYYADAVKDRFTISRDDSKNTVYLQMNNLKTEDTAVYYCARAGNFGSSYISYWAYWGQGTLVTVSSGGGGSGGGGSGGGGSQTVVTQEPSLTVSPGGTVTITCGSSTGAVTSGNYPNWVQKKPGQAPRGLIGGTKFLAPGTPARFSGSLSGGKAALTLSGVQPEDEAEYYCVLWYSNRWVFGSGTKLTVLGGGGDKTHTCPPCPAPELLGGPSVFLFPPKPKDTLMISRTPEVTCVVVDVSHEDPEVKFNWYVDGVEVHNAKTKPCEEQYGSTYRCVSVLTVLHQDWLNGKEYKCKVSNKALPAPIEKTISKAKGQPREPQVYTLPPSREEMTKNQVSLTCLVKGFYPSDIAVEWESNGQPENNYKTTPPVLDSDGSFFLYSKLTVDKSRWQQGNVFSCSVMHEALHNHYTQKSLSLSPGKGGGGSGGGGSGGGGSGGGGSGGGGSGGGGSDKTHTCPPCPAPELLGGPSVFLFPPKPKDTLMISRTPEVTCVVVDVSHEDPEVKFNWYVDGVEVHNAKTKPCEEQYGSTYRCVSVLTVLHQDWLNGKEYKCKVSNKALPAPIEKTISKAKGQPREPQVYTLPPSREEMTKNQVSLTCLVKGFYPSDIAVEWESNGQPENNYKTTPPVLDSDGSFFLYSKLTVDKSRWQQGNVFSCSVMHEALHNHYTQKSLSLSPGK

SEQ ID NO: 378 - protein, 1225 aa, Artificial Sequence
  Synthetic
EVQLVESGGGLVQPGRSLRLSCAASGFTFHDYTMHWVRQAPGKCLEWVSGISWNTGTIGYADSVKGRFTISRDNAKNSLYLQMNSLRAEDTALYYCVKDAFYGGDYYYNYGMDVWGHGTTVTVSSGGGGQGGGGQGGGGQEIVLTQSPATLSVSPGERATLSCRASQSVNNNLAWYQQKPGQAPRLLIYGASTRATGIPARFSGSGSGTDFTLTISSLQSDDFAVYYCQQYNNWPLTFGCGTKVEIKSGGGGQQVQLVQSGAEVKKPGASVKVSCKASGYSFTSYGITWVRQAPGQCLEWMGWISAYNGNTIYAQKLQGRVTMTTDTSTSTAYMELRSLRSDDTAVYYCVRDSNHEDFWGQGTLVTVSSGGGGQGGGGQGGGGQEIVLTQSPATLSVSPGERATLSCRASQSVSSNLAWYQQKPGQAPRLLIYGASTRATGIPARFSGSGSGTEFTLTISSLQSEDFAVYYCQQYHTWPPVTFGCGTKVEIKSGGGGQEVQLVESGGGLVQPGGSLKLSCAASGFTFNKYAINWVRQAPGKGLEWVARIRSKYNNYATYYADAVKDRFTISRDDSKNTVYLQMNNLKTEDTAVYYCARAGNFGSSYISYWAYWGQGTLVTVSSGGGGQGGGGQGGGGQQTVVTQEPSLTVSPGGTVTITCGSSTGAVTSGNYPNWVQKKPGQAPRGLIGGTKFLAPGTPARFSGSLSGGKAALTLSGVQPEDEAEYYCVLWYSNRWVFGSGTKLTVLGGGGCPPCPAPELLGGPSVFLFPPKPKDTLMISRTPEVTCVVVDVSHEEPEVKFNWYVDGVEVHNAKTKPCEEQYGSTYRCVSVLTVLHQDWLNGKEYKCKVSNKALPAPIEKTISKAKGQPREPQVYTLPPSREEMTKNQVSLTCLVKGFYPSDIAVEWESNGQPENNYKTTPPVLDSDGSFFLYSKLTVDKSRWQQGNVFSCSVMHEALHNHYTQKSLSLSPGKGGGGQGGGGQGGGGQGGGGQGGGGQGGGGQCPPCPAPELLGGPSVFLFPPKPKDTLMISRTPEVTCVVVDVSHEEPEVKFNWYVDGVEVHNAKTKPCEEQYGSTYRCVSVLTVLHQDWLNGKEYKCKVSNKALPAPIEKTISKAKGQPREPQVYTLPPSREEMTKNQVSLTCLVKGFYPSDIAVEWESNGQPENNYKTTPPVLDSDGSFFLYSKLTVDKSRWQQGNVFSCSVMHEALHNHYTQKSLSLSPGK

SEQ ID NO: 379 - protein, 5 aa, Artificial Sequence
  Synthetic
SYGIS

SEQ ID NO: 380 - protein, 17 aa, Artificial Sequence
  Synthetic
WISAYTGETLYAQKLQG

SEQ ID NO: 381 - protein, 13 aa, Artificial Sequence
  Synthetic
DPDYYGSGSYSDY

SEQ ID NO: 382 - protein, 11 aa, Artificial Sequence
  Synthetic
RASQSVSSNLA

SEQ ID NO: 383 - protein, 7 aa, Artificial Sequence
  Synthetic
GASSRAT

SEQ ID NO: 384 - protein, 10 aa, Artificial Sequence
  Synthetic
QQYHSWPLLT

SEQ ID NO: 385 - protein, 122 aa, Artificial Sequence
  Synthetic
QVQLVQSGGEVKKPGASVKVSCKASGYTFTSYGISWVRQAPGQCLEWMGWISAYTGETLYAQKLQGRVTMTRDTSTSTAYMELRSLRSDDTAVYYCARDPDYYGSGSYSDYWGQGTLVTVSS

SEQ ID NO: 386 - protein, 108 aa, Artificial Sequence; identical to SEQ ID NO: 40
  Synthetic

SEQ ID NO: 387 - protein, 245 aa, Artificial Sequence
  Synthetic
QVQLVQSGGEVKKPGASVKVSCKASGYTFTSYGISWVRQAPGQCLEWMGWISAYTGETLYAQKLQGRVTMTRDTSTSTAYMELRSLRSDDTAVYYCARDPDYYGSGSYSDYWGQGTLVTVSSGGGGSGGGGSGGGGSEIVLTQSPATLSVSPGERATLSCRASQSVSSNLAWYQQKPGQAPRLLIYGASSRATGIPARFSGSGSGTEFTLTISSLQSEDFAVYYCQQYHSWPLLTFGCGTKVEIK

SEQ ID NO: 388 - protein, 500 aa, Artificial Sequence
  Synthetic
QVQLVQSGGEVKKPGASVKVSCKASGYTFTSYGISWVRQAPGQCLEWMGWISAYTGETLYAQKLQGRVTMTRDTSTSTAYMELRSLRSDDTAVYYCARDPDYYGSGSYSDYWGQGTLVTVSSGGGGSGGGGSGGGGSEIVLTQSPATLSVSPGERATLSCRASQSVSSNLAWYQQKPGQAPRLLIYGASSRATGIPARFSGSGSGTEFTLTISSLQSEDFAVYYCQQYHSWPLLTFGCGTKVEIKSGGGGSEVQLVESGGGLVQPGGSLKLSCAASGFTFNKYAMNWVRQAPGKGLEWVARIRSKYNNYATYYADSVKDRFTISRDDSKNTAYLQMNNLKTEDTAVYYCVRHGNFGNSYISYWAYWGQGTLVTVSSGGGGSGGGGSGGGGSQTVVTQEPSLTVSPGGTVTLTCGSSTGAVTSGNYPNWVQQKPGQAPRGLIGGTKFLAPGTPARFSGSLLGGKAALTLSGVQPEDEAEYYCVLWYSNRWVFGGGTKLTVL

SEQ ID NO: 389 - protein, 500 aa, Artificial Sequence
  Synthetic
QVQLVQSGGEVKKPGASVKVSCKASGYTFTSYGISWVRQAPGQCLEWMGWISAYTGETLYAQKLQGRVTMTRDTSTSTAYMELRSLRSDDTAVYYCARDPDYYGSGSYSDYWGQGTLVTVSSGGGGSGGGGSGGGGSEIVLTQSPATLSVSPGERATLSCRASQSVSSNLAWYQQKPGQAPRLLIYGASSRATGIPARFSGSGSGTEFTLTISSLQSEDFAVYYCQQYHSWPLLTFGCGTKVEIKSGGGGSEVQLVESGGGLVQPGGSLKLSCAASGFTFNKYAINWVRQAPGKGLEWVARIRSKYNNYATYYADAVKDRFTISRDDSKNTVYLQMNNLKTEDTAVYYCARAGNFGSSYISYWAYWGQGTLVTVSSGGGGSGGGGSGGGGSQTVVTQEPSLTVSPGGTVTITCGSSTGAVTSGNYPNWVQKKPGQAPRGLIGGTKFLAPGTPARFSGSLSGGKAALTLSGVQPEDEAEYYCVLWYSNRWVFGSGTKLTVL

SEQ ID NO: 390 - protein, 988 aa, Artificial Sequence
  Synthetic
QVQLVQSGGEVKKPGASVKVSCKASGYTFTSYGISWVRQAPGQCLEWMGWISAYTGETLYAQKLQGRVTMTRDTSTSTAYMELRSLRSDDTAVYYCARDPDYYGSGSYSDYWGQGTLVTVSSGGGGSGGGGSGGGGSEIVLTQSPATLSVSPGERATLSCRASQSVSSNLAWYQQKPGQAPRLLIYGASSRATGIPARFSGSGSGTEFTLTISSLQSEDFAVYYCQQYHSWPLLTFGCGTKVEIKSGGGGSEVQLVESGGGLVQPGGSLKLSCAASGFTFNKYAMNWVRQAPGKGLEWVARIRSKYNNYATYYADSVKDRFTISRDDSKNTAYLQMNNLKTEDTAVYYCVRHGNFGNSYISYWAYWGQGTLVTVSSGGGGSGGGGSGGGGSQTVVTQEPSLTVSPGGTVTLTCGSSTGAVTSGNYPNWVQQKPGQAPRGLIGGTKFLAPGTPARFSGSLLGGKAALTLSGVQPEDEAEYYCVLWYSNRWVFGGGTKLTVLGGGGDKTHTCPPCPAPELLGGPSVFLFPPKPKDTLMISRTPEVTCVVVDVSHEDPEVKFNWYVDGVEVHNAKTKPCEEQYGSTYRCVSVLTVLHQDWLNGKEYKCKVSNKALPAPIEKTISKAKGQPREPQVYTLPPSREEMTKNQVSLTCLVKGFYPSDIAVEWESNGQPENNYKTTPPVLDSDGSFFLYSKLTVDKSRWQQGNVFSCSVMHEALHNHYTQKSLSLSPGKGGGGSGGGGSGGGGSGGGGSGGGGSGGGGSDKTHTCPPCPAPELLGGPSVFLFPPKPKDTLMISRTPEVTCVVVDVSHEDPEVKFNWYVDGVEVHNAKTKPCEEQYGSTYRCVSVLTVLHQDWLNGKEYKCKVSNKALPAPIEKTISKAKGQPREPQVYTLPPSREEMTKNQVSLTCLVKGFYPSDIAVEWESNGQPENNYKTTPPVLDSDGSFFLYSKLTVDKSRWQQGNVFSCSVMHEALHNHYTQKSLSLSPGK

SEQ ID NO: 391 - protein, 988 aa, Artificial Sequence
  Synthetic
QVQLVQSGGEVKKPGASVKVSCKASGYTFTSYGISWVRQAPGQCLEWMGWISAYTGETLYAQKLQGRVTMTRDTSTSTAYMELRSLRSDDTAVYYCARDPDYYGSGSYSDYWGQGTLVTVSSGGGGSGGGGSGGGGSEIVLTQSPATLSVSPGERATLSCRASQSVSSNLAWYQQKPGQAPRLLIYGASSRATGIPARFSGSGSGTEFTLTISSLQSEDFAVYYCQQYHSWPLLTFGCGTKVEIKSGGGGSEVQLVESGGGLVQPGGSLKLSCAASGFTFNKYAINWVRQAPGKGLEWVARIRSKYNNYATYYADAVKDRFTISRDDSKNTVYLQMNNLKTEDTAVYYCARAGNFGSSYISYWAYWGQGTLVTVSSGGGGSGGGGSGGGGSQTVVTQEPSLTVSPGGTVTITCGSSTGAVTSGNYPNWVQKKPGQAPRGLIGGTKFLAPGTPARFSGSLSGGKAALTLSGVQPEDEAEYYCVLWYSNRWVFGSGTKLTVLGGGGDKTHTCPPCPAPELLGGPSVFLFPPKPKDTLMISRTPEVTCVVVDVSHEDPEVKFNWYVDGVEVHNAKTKPCEEQYGSTYRCVSVLTVLHQDWLNGKEYKCKVSNKALPAPIEKTISKAKGQPREPQVYTLPPSREEMTKNQVSLTCLVKGFYPSDIAVEWESNGQPENNYKTTPPVLDSDGSFFLYSKLTVDKSRWQQGNVFSCSVMHEALHNHYTQKSLSLSPGKGGGGSGGGGSGGGGSGGGGSGGGGSGGGGSDKTHTCPPCPAPELLGGPSVFLFPPKPKDTLMISRTPEVTCVVVDVSHEDPEVKFNWYVDGVEVHNAKTKPCEEQYGSTYRCVSVLTVLHQDWLNGKEYKCKVSNKALPAPIEKTISKAKGQPREPQVYTLPPSREEMTKNQVSLTCLVKGFYPSDIAVEWESNGQPENNYKTTPPVLDSDGSFFLYSKLTVDKSRWQQGNVFSCSVMHEALHNHYTQKSLSLSPGK

SEQ ID NO: 392 - protein, 5 aa, Artificial Sequence
  Synthetic
KYAMN

SEQ ID NO: 393 - protein, 19 aa, Artificial Sequence
  Synthetic
RIRSKYNNYATYYADSVKD

SEQ ID NO: 394 - protein, 14 aa, Artificial Sequence
  Synthetic
HGNFGNSYISYWAY

SEQ ID NO: 395 - protein, 14 aa, Artificial Sequence
  Synthetic
GSSTGAVTSGNYPN

SEQ ID NO: 396 - protein, 7 aa, Artificial Sequence
  Synthetic
GTKFLAP

SEQ ID NO: 397 - protein, 9 aa, Artificial Sequence
  Synthetic
VLWYSNRWV

SEQ ID NO: 398 - protein, 125 aa, Artificial Sequence
  Synthetic
EVQLVESGGGLVQPGGSLKLSCAASGFTFNKYAMNWVRQAPGKGLEWVARIRSKYNNYATYYADSVKDRFTISRDDSKNTAYLQMNNLKTEDTAVYYCVRHGNFGNSYISYWAYWGQGTLVTVSS

SEQ ID NO: 399 - protein, 109 aa, Artificial Sequence; identical to SEQ ID NO: 13
  Synthetic

SEQ ID NO: 400 - protein, 249 aa, Artificial Sequence
  Synthetic
EVQLVESGGGLVQPGGSLKLSCAASGFTFNKYAMNWVRQAPGKGLEWVARIRSKYNNYATYYADSVKDRFTISRDDSKNTAYLQMNNLKTEDTAVYYCVRHGNFGNSYISYWAYWGQGTLVTVSSGGGGSGGGGSGGGGSQTVVTQEPSLTVSPGGTVTLTCGSSTGAVTSGNYPNWVQQKPGQAPRGLIGGTKFLAPGTPARFSGSLLGGKAALTLSGVQPEDEAEYYCVLWYSNRWVFGGGTKLTVL

SEQ ID NO: 401 - protein, 5 aa, Artificial Sequence
  Synthetic
KYAIN

SEQ ID NO: 402 - protein, 19 aa, Artificial Sequence
  Synthetic
RIRSKYNNYATYYADAVKD

SEQ ID NO: 403 - protein, 14 aa, Artificial Sequence
  Synthetic
AGNFGSSYISYWAY

SEQ ID NO: 404 - protein, 14 aa, Artificial Sequence
  Synthetic
GSSTGAVTSGNYPN

SEQ ID NO: 405 - protein, 7 aa, Artificial Sequence
  Synthetic
GTKFLAP

SEQ ID NO: 406 - protein, 9 aa, Artificial Sequence
  Synthetic
VLWYSNRWV

SEQ ID NO: 407 - protein, 125 aa, Artificial Sequence
  Synthetic
EVQLVESGGGLVQPGGSLKLSCAASGFTFNKYAINWVRQAPGKGLEWVARIRSKYNNYATYYADAVKDRFTISRDDSKNTVYLQMNNLKTEDTAVYYCARAGNFGSSYISYWAYWGQGTLVTVSS

SEQ ID NO: 408 - protein, 109 aa, Artificial Sequence
  Synthetic
QTVVTQEPSLTVSPGGTVTITCGSSTGAVTSGNYPNWVQKKPGQAPRGLIGGTKFLAPGTPARFSGSLSGGKAALTLSGVQPEDEAEYYCVLWYSNRWVFGSGTKLTVL

SEQ ID NO: 409 - protein, 249 aa, Artificial Sequence
  Synthetic
EVQLVESGGGLVQPGGSLKLSCAASGFTFNKYAINWVRQAPGKGLEWVARIRSKYNNYATYYADAVKDRFTISRDDSKNTVYLQMNNLKTEDTAVYYCARAGNFGSSYISYWAYWGQGTLVTVSSGGGGSGGGGSGGGGSQTVVTQEPSLTVSPGGTVTITCGSSTGAVTSGNYPNWVQKKPGQAPRGLIGGTKFLAPGTPARFSGSLSGGKAALTLSGVQPEDEAEYYCVLWYSNRWVFGSGTKLTVL
